(19) United States
(12) Patent Application Publication
(10) Pub. No.: US 2014/0234357 A1
(43) Pub. Date: Aug. 21, 2014

(54) H5 PROTEINS OF H5N1 INFLUENZA VIRUS FOR USE AS A MEDICAMENT

(71) Applicant: Egbert Siegfried MUNDT, Isernhagen (DE)

(72) Inventor: Egbert Siegfried MUNDT, Isernhagen (DE)

(73) Assignee: BOEHRINGER INGELHEIM VETMEDICA GMBH, Ingelheim am Rhein (DE)

(21) Appl. No.: 14/184,919

(22) Filed: Feb. 20, 2014

(30) Foreign Application Priority Data
Feb. 21, 2013 (EP) PCT/EP2013/053505

(51) Int. Cl. A61K 39/145; C07K 14/005

(52) U.S. Cl. CPC A61K 39/145; C07K 14/005
USPC 424/186.1; 530/350

(57) ABSTRACT

The present invention is based on the surprising finding that H5 protein of clade 1 H5N1 induces, in particular by a single-shot vaccination, a cross-clade protective immune response to influenza viruses with H5N1 HA. In one aspect, the invention is thus directed to H5 protein of clade 1 H5N1 virus for use in a method of treating or preventing infections with H5N1 virus of a different clade, wherein the H5N1 virus of a different clade comprises a particular polynucleotide and/or H5 protein.

### SEQUENCE LISTING

[0001] This application contains a sequence listing in accordance with 37 C.F.R. 1.821-1.825. The sequence listing accompanying this application is hereby incorporated by reference in its entirety.

### FIELD OF THE INVENTION

[0002] The present invention relates to the field of medicine, preferably to the field of infectious diseases. In particular the present invention relates to influenza proteins and vaccines. Most particularly, the present invention relates to the use of any of such proteins or vaccines for the treatment and prevention of influenza infections, furthermore for the prevention of intra- and inter-species transmission of influenza virus.

### BACKGROUND OF THE INVENTION

[0003] Influenza infection remains an important infection in animals and humans. Influenza is caused by viruses that undergo continuous antigenic changes/modifications and that possess an animal reservoir. Thus new epidemics and pandemics may occur in the future, and eradication of the disease will be difficult to achieve. Influenza viruses are well known in the art and described more in detail for example by P. Palese, Nature Medicine, vol. 10, no. 12, pp. S 82 to S 86 of December 2004, with further references. Briefly, the genome of the influenza A virus consists of eight single-stranded segments and the viral particles has two major glycoproteins on its surface: hemagglutinin (H) and neuraminidase (N). With at least 16 different hemagglutinin (H1 to H16) and 9 different neuraminidase (N1 to N9) subtypes, there is a considerable antigenic variation among influenza viruses.

[0004] Influenza virus of type H5N1 Fowl Plague virus has been demonstrated to infect poultry, pigs and man. The viruses can also be transmitted directly from avian species to humans (Claas et al., Lancet 1998, 351: 472; Suarez et al., J. Virol. 1998, 72: 6678; Subbarao et al., Science 1998, 279: 393; Shortridge, Vaccine 1999, 17 (Suppl. 1): S26-S29). Mortality in known human clinical cases approaches about 50%.

[0005] Over the last century pigs have been an important vector for influenza pandemics. Pigs, camels, and seals, preferably pigs, can serve as a ‘mixing chamber’ for avian influenza viruses, and therefore represent a potential risk factor for overcoming the species hurdles from poultry, the naturally reservoir of influenza viruses, to mammals. This normally occurs by double infections of the susceptible animals, e.g. pig, with both, an established mammalian (porcine), as well as an avian influenza virus. This double infection may create new recombinant viruses that may be the cause of human or porcine pandemics. Recent evidence would, however, indicate that a recombination of current avian H5 strains with mammalian influenza viruses will not result in highly virulent recombinants. On the other hand, avian influenza virus can infect pigs and by spontaneous mutations can become adapted to pigs. The critical hurdle will be overcome as soon as the virus can cause horizontal infections within a pig (or other mammalian) population.

[0006] Yet, a major part of Southeast Asian pigs have been infected with avian (H5) influenza virus strains originating from neighboring poultry husbandry. As those infections have so far been sub-clinical, they can only be diagnosed by laboratory methods and thus are frequently overlooked. There is a high risk that those sub-clinically-infected pigs will serve as an opportunity for the virus to adapt to the mammalian system, spread within the porcine population, and also infect human beings.

[0007] Current influenza vaccines include a subunit vaccine (Babai et al., Vaccine 1999, 17(9-10):1223-1238; Crawford et al., Vaccine 1999, 17(18):2265-2274; Johansson et al., Vaccine 1999, 17(15-16):2073-2080) attenuated vaccine (Horimoto et al., Vaccine 2004, 22(17-18):2244-2247), DNA vaccine (Watabe et al., Vaccine 2001, 19(31):4434-4444) and inactivated influenza vaccine (Cao et al., Vaccine 1992, 10(4):238-242), with the latter being the most widely used on a commercial scale (Lipatov et al., J Virol 2004, 78(17):8951-8959).

[0008] Subunit vaccines, recombinant hemagglutinin and neuraminidase (Babai et al., Vaccine 1999, 17(9-10):1223-1238; Crawford et al., Vaccine 1999, 17(18):2265-2274; Johansson et al., Vaccine 1999, 17(15-16):2073-2080) may be an attractive alternative to the inactivated vaccine, although none are currently in use as commercial vaccines. The preparation of such vaccines is obviously safer than for an inactivated vaccine. Moreover, subunit vaccines do not generate antibody responses to internal influenza viral proteins and thus allow distinction between vaccinated and infected animals (Crawford et al., Vaccine 1999, 17(18):2265-2274).

[0009] Hemagglutinin protein is the receptor-binding and membrane fusion glycoprotein of influenza virus and the target for infectivity-neutralizing antibodies. The entire hemagglutinin protein (HA) from the H5N1 is composed of 568 amino acids, with a molecular weight of 56 kDa. The HA molecule consists of HA1 and HA2 subunits, with the HA1 subunit mediating initial contact with the cell membrane and HA2 being responsible for membrane fusion (Chizmadzhev, Bioelectrochemistry 2004, 63(1-2):129-136).

[0010] Baculovirus/insect cell systems have been used to express hemagglutinin genes isolated from avian influenza subtypes (Babai et al., Vaccine 1999, 17(9-10):1223-1238; Crawford et al., Vaccine 1999, 17(18):2265-2274; Johansson et al., Vaccine 1999, 17(15-16):2073-2080); Nwe et al., BMC Microbiology 2006, 6(16):doi:10.1186/1471-2180-6-16). However, those recombinant proteins seem not to be protective in any case, or only less effective at least for some species (Treanor et al., Vaccine 2001, 19: 1732-1737).

[0011] The document Lin et al. (J Vet Med. Sci. 2008 70(11):1147-52) discloses the use of a baculovirus/insect cell system for the production of H5 protein of clade 2 H5N1 virus A/duck/China/E319-2/03, which is usable for a prime-booster vaccination for preventing an infection with the clade 2 virus A/duck/China/E319-2/03.

[0012] Bright et al. (PLoS One. 2008 30;3(1):e1501) describes the use of a baculovirus/insect cell system for generating virus-like particles (VLPs) which include neuraminidase, hemagglutinin and matrix 1 protein from clade 2 H5N1 virus for inducing a cross-clade protective immune response against a challenge with clade 1 H5N1 virus A/VN/1203/2004 in mice. However, the production of VLPs is not without problems, since in order to generate a functional VLP that effectively mimic a real virus, multiple virus structural proteins are needed which must then be correctly assembled into a particle that reproduces the confirmation of the outer shell (capsid) of the infectious virus. Further, study also reals that in vitro assembly of VLPs competes with aggregation (Ding et al. Biotechnology and Bioengineering 107 (3): 550-560).

[0013] Thus, there is a need to increase availability of improved vaccines and new vaccination approaches to provide better approaches to control influenza infections and to have a positive impact on disease load. In particular, there is a strong need for a simple, effective and easy-to-handle system inducing, preferably by a single-shot vaccination, a cross-clade protective immune response to influenza viruses with H5N1 HA.

### DESCRIPTION OF THE INVENTION

[0014] Before the embodiments of the present invention it shall be noted that as used herein and in the appended claims, the singular forms “a”, “an”, and “the” include plural reference unless the context clearly dictates otherwise. Thus, for example, reference to “a preparation” includes a plurality of such preparations; reference to the “carrier” is a reference to one or more carriers and equivalents thereof known to those skilled in the art, and so forth. Unless defined otherwise, all technical and scientific terms used herein have the same meanings as commonly understood by one of ordinary skill in the art to which this invention belongs. All given ranges and values may vary by 1 to 5% unless indicated otherwise or known otherwise by the person skilled in the art, therefore, the term “about” was omitted from the description. Although any methods and materials similar or equivalent to those described herein can be used in the practice or testing of the present invention, the preferred methods, devices, and materials are now described. All publications mentioned herein are incorporated herein by reference for the purpose of describing and disclosing the substances, excipients, carriers, and methodologies as reported in the publications which might be used in connection with the invention. Nothing herein is to be construed as an admission that the invention is not entitled to antedate such disclosure by virtue of prior invention.

[0015] The solution to the above technical problem is achieved by the description and the embodiments characterized in the claims.

### Influenza Proteins and Nucleic Acid Molecules Coding for Those

[0016] The present invention is based on the surprising finding that H5 protein of clade 1 H5N1 induces, in particular by a single-shot vaccination, a cross-clade protective immune response to influenza viruses with H5N1 HA. As one feature, the H5 protein of clade 1 H5N1 virus, which is for reasons of clarity also termed “H5 protein (1)” herein, comprises or consists of a polypeptide sequence having at least 98% sequence identity with the polypeptide sequence set forth in SEQ ID NO:1.

[0017] Sequence identity with a sequence, as mentioned herein, in particular means sequence identity over the length of said sequence or sequence identity over the whole length of said sequence, respectively.

[0018] A “single-shot vaccination” refers to an immunogenic composition that is effective at reducing the incidence of or severity of infection after a single dose thereof, without the need for a booster.

[0019] In one aspect, the invention is thus directed to H5 protein (1) of clade 1 H5N1 virus for use in a method of treating or preventing infections with H5N1 virus of a different clade, namely of a clade different from clade 1 or from any clade with the exception of clade 1, respectively, wherein said H5 protein (1) comprises or consists of a polypeptide sequence having at least 98% sequence identity with the polypeptide sequence of SEQ ID NO:1.

[0020] The term “clade” or “clades” as used herein relates to the clade(s) of the WHO Nomenclature System for the highly Pathogenic Avian Influenza Virus (H5N1), which is summarized at the WHO website URL:

who.int/csr/disease/avian_influenza/guidelines/nomenclature/en/ (12 Aug. 2011), which is incorporated herein by reference
10 distinct initial clades of viruses (numbered 0-9) are defined (WHO/OIE/FAO H5N1 Evolution Working Group, 2008), which are called first order clades. Clades are strictly defined on the nucleotide level as meeting the following three specific clade definition criteria developed by the WHO/OIE/FAO H5N1 Evolution Working Group:
[0021] sharing of a common (clade-defining) node;
[0022] monophyletic grouping with a bootstrap value of ≧60 at the clade-defining node (after 1000 neighbor-joining bootstrap replicates); and
[0023] average percentage pairwise nucleotide distances between and within clades of >1.5% and <1.5%, respectively.

[0024] As the viruses within these 10 clades continue to evolve, new sublineages (potential H5N1 clades) periodically emerge. Once these sublineages meet the same three specific clade definition criteria as the initial 10 clades (numbered 0-9), they are designated as separate clades (WHO/OIE/FAO H5N1 Evolution Working Group Emerg. Inf. Dis. 14, 7 (2008). These new clades are defined as second (or third, etc.) order clades and assigned a numerical ‘address’ which links them to their original clade using a hierarchical decimal numbering system. For example, within the antigenically distinct clade 2.3, third order clades meeting the clade definition are designated as clades 2.3.1 and 2.3.2 and so on. This logical hierarchal numbering system is objectively related to HA phylogeny.

[0025] The criteria used for the clade designation according to the WHO Nomenclature System for H5N1 are:
[0026] 1 Maintain previously designated clade numbers where possible (i.e., clade 2.2 remains 2.2 and clade 1 remains 1)
[0027] 2 New clade designations based on phylogenetic tree topology derived from all available sequences (the large tree)
   [0028] H5N1 progenitors (closest to Gs/Guangdong/1/96) re-designated as clade 0 Subsequent clades numbered starting from clade 3 (i.e., clades 3-9)
   [0029] Clades designated by presence of a distinct common node shared by at least 4 isolates (in a monophyletic group)
   [0030] Additional branches designated as a single clade evolves into more than one distinct lineage (i.e., clade 2.2 or clade 2.3.1; based on sharing of a common node and monophyletic grouping)
[0031] 3 Average percentage pairwise distances between and within clades (using Kimura 2-parameter)
   [0032] Distinct clades should have >1.5% average distances between other clades
   [0033] Distinct clades should have <1.5% average distances within the clade (may be slightly higher in clades with highly evolved outliers; i.e., Ck/Shanxi/2/2006 in clade 7)
[0034] 4 Bootstrap (based on 1,000 neighbor-joining bootstrap replicates)>60% bootstrap value at clade-defining node
   (taken from Table 1 of: WHO/OIE/FAO H5N1 Evolution Working Group Emerg. Inf. Dis. 14, 7 (2008)).

[0035] The prototype strain for each clade is listed in the following Table:

| Clade | Prototype strain |
|---|---|
| 0 | Gs/Guangdong/1/96 |
| 3 | Ck/Hong Kong/YU562/2001 |
| 4 | Gs/Guiyang/337/2006 |
| 5 | Gs/Guangxi/914/2004 |
| 6 | Ck/Hunan/01/2004 |
| 7 | Ck/Shanxi/2/2006 |
| 8 | Ck/Hong Kong/YU777/2002 |
| 9 | Dk/Guangxi/2775/2005 |
| 1 | Vietnam/1203/2004 |
| 2.1.1 | Ck/Indonesia/BL/2003 |
| 2.1.2 | Indonesia/538H/2006 |
| 2.1.3 | Indonesia/5/2005 |
| 2.2 | BHGs/Qinghai/1A/2005 |
| 2.3.1 | Dk/Hunan/303/2004 |
| 2.3.2 | Ck/Guangxi/2461/2004 |
| 2.3.3 | Ck/Guiyang/3055/2005 |
| 2.3.4 | Dk/Fujian/1734/2005 |
| 2.4 | Ck/Yunnan/115/2004 |
| 2.5 | Ck/Korea/ES/2003 |
| 2.5 | Ck/Korea/ES/2003 |

(taken from Table 2 of: WHO/OIE/FAO H5N1 Evolution Working Group Emerg. Inf. Dis. 14, 7 (2008)).

[0036] The publication WHO/OIE/FAO H5N1 Evolution Working Group Emerg. Inf. Dis. 14, 7 (2008), which is incorporated herein by reference, is found at the CDC website URL: cdc.gov/EID/content/14/7/el.htm (12 Aug. 2011).

[0037] An overview of the clade classification of known H5N1 viruses is provided by the phylogenetic tree at the WHO website URL: who.int/csr/disease/avian_influenza/H5CompleteTree.pdf (15 Aug. 2011), which is hereby incorporated by reference.

[0038] For determining the clade of a H5 protein of H5N1, for example, the web based tool “Highly Pathogenic Avian Influenza (HPAI) H5N1 HA clade prediction” can be used, which is described by Lu, Davis, Rowley, and Donis: “A Web-based tool for the clade designation of highly pathogenic avian influenza H5N1 viruses” in Options for the Control of Influenza VI. J. M. Katz, N. Cox & A. W. Hampson (Eds.) London: Blackwell, 2007, herein incorporated by reference, and which is found at the website URL: h5n1.flugenome.org/grouping.php (12 Aug. 2011).

[0039] For example, a H5 protein of clade 1 H5N1 virus (H5 protein (1)) is thus a HA with an amino acid sequence encoded by a nucleotide sequence of a clade 1 according to the above-mentioned WHO Nomenclature System for H5N1.

[0040] A clade 2.3.1 H5N1 virus, for instance, is hence a H5N1 falling under the criteria of a clade 2.3.1 according to the above-mentioned WHO Nomenclature System for H5N1.

[0041] In a preferred embodiment, the H5 protein (1) according to the invention, namely the H5 protein of clade 1 H5N1 virus as described herein, comprises or consists of a polypeptide sequence having at least 98.1%, preferably at least 98.2%, more preferably at least 98.3%, and most preferably at least 98.4% sequence identity with the polypeptide sequence of SEQ ID NO:1.

[0042] Sequence identity in the context of the invention is understood as being based on determined pairwise similarity between protein sequences. The determination of percent similarity between two sequences is preferably accomplished using a computational algorithm, in particular the well-known Basic Local Alignment Search Tool (Altschul S F, Gish W, Miller W, Myers E W, Lipman D J: Basic local alignment search tool. J Mol Biol 1990, 215(3):403-410). For purposes of the present invention, percent sequence identity of an amino acid sequence is determined using the BLAST blastp homology search algorithm using the following parameters: an expected threshold of 10, word size 3, BLOSUM62 matrix, gap opening penalty of 11, a gap extension penalty of 1, and conditional compositional score matrix adjustment. The database to search against is the set of non-redundant protein sequences (nr). The BLAST homology search algorithm is described in Altschul S F (1990), J Mol Biol 1990, 215(3):403-410, which is herein incorporated by reference.

[0043] A variant may, for example, differ from the reference accession number BAE07201 molecule without signal peptide (N-terminal 16 amino acid residues are not shown in SEQ ID NO:1) by as few as 1 to 15 amino acid residues, as few as 1 to 10 amino acid residues, such as 6-10, as few as 5, as few as 4, 3, 2, or even 1 amino acid residue.

[0044] In one exemplary embodiment, the H5 protein (1) according to the invention, i.e. the H5 protein (1) of clade 1 H5N1 virus for use in a method of treating or preventing infections with H5N1 virus of a different clade, is preferably a H5 protein of influenza virus, wherein the H5 protein having the amino acid 223N and the modification 328K+, wherein numbering of the amino acid positions of the H5 protein refers to the amino acid position as exemplarily given in SEQ ID NO:2 and wherein the modification 328K+ means that at amino acid position 328 of H5 protein a second Lysine (K+) is inserted. Said preferred H5 protein (1) is also termed Mut k+ or mutK+ in the following. Preferably, such H5 protein and any further H5 protein according to the invention is an isolated H5 protein.

[0045] The term “H5 protein (1) of clade 1 H5N1”, as used herein, preferably means “H5 protein (1) as single antigen of clade 1 H5N1 virus” or in particular “H5 protein (1) as single antigen”.

[0046] The terms “hemagglutinin 5 (H5)” or “H5 of avian influenza virus” or “H5 protein” as used herein are equivalent and mean, but are not limited to any naturally occurring H5 protein and any modified forms of H5 protein, including any deletion, substitution and/or insertion mutant of H5 protein.

[0047] The numbering of the amino acid positions of the H5 protein (1) Mut k+ as used herein refers to the amino acid position as exemplarily given in SEQ ID NO:2. SEQ ID NO:2 represents the amino sequence of the hemagglutinin of strain duck/China/E319-2/03 but lacking the amino terminal signal peptide. In other words, if reference is made to the amino acid at position 223 (amino acid 223), the amino acid residue is meant which corresponds to amino acid 223 of SEQ ID NO:2. However, this does not mean that the H5 protein Mut k+ according to the invention has the identical amino acid sequence with SEQ ID NO:2. It only says, that the corresponding amino acids of the H5 proteins according to the inventions code for the amino acid residue, as explicitly mentioned. In the current case, amino acid 223 would be Serine (S). The terms “223N”, or “155N” exemplarily mean, that the amino acid at positions 223 and 155, respectively—numbering according to the amino acid positions of SEQ ID NO:2—that amino acid shall code for the amino acid Asparagine (N). In other words, if reference is made to “H5 protein (1) having the amino acid 223N”, a H5 amino acid molecule that normally codes for Serine at amino acid position 223—numbering according to the amino acid positions of SEQ ID NO:2—that amino acid shall be substituted by an Asparagine (N). The term “328K+” or “modification 328K+” means, that at amino acid position 328 of H5 protein—numbering according to the amino acid positions of SEQ ID NO:2—, a second Lysine (K+) is inserted. In cases were amino acids sequences at positions 328 and 329 naturally codes for Lysine-Lysine, no further Lysine (K) shall be inserted. However, most of the known H5 sequences code at amino acid positions 328 and 329 for Lysine-Arginine. In any such cases, the term 328K+ modification means that a second Lysine (K) shall be inserted between Lysine at position 328 and Arginine at position 329. The modified sequence would read then Lysine-Lysine-Arginine (KKR).

[0048] Regarding the present example, the hemagglutinin of strain duck/China/E319-2/03 is shifted to a H5 protein (1) of clade 1 H5N1, since it resembles the H5 sequence of the clade 1 H5N1 virus A/HongKong/213/2003, the year/location/host of this HK isolate, and shows reactivity with clade-1-specific antibodies. Hence the Mut K+ sequence is classified as a H5 sequence of a clade 1 H5N1. Within the context of the invention, the designed Mut K+ sequence is thus understood and defined to be a H5 protein of clade 1 H5N1 virus.

[0049] Thus, in particular also any designed H5 protein is understood and defined as a H5 protein of clade 1 H5N1 virus according to the invention, if it is encoded by a nucleotide sequence which fulfils the criteria of a nucleotide sequence of a clade 1 according to the above-mentioned WHO Nomenclature System for H5N1.

[0050] Thus, in one embodiment, the present invention is implemented with a H5 protein and any modified forms of H5 protein, including any deletion, substitution and/or insertion mutant of H5 protein, wherein those H5 proteins having the amino acid 223N and the modification 328K+, wherein numbering of the amino acid positions of the H5 protein refers to the amino acid position as exemplarily given in SEQ ID NO:2 and wherein the modification 328K+ means that at amino acid position 328 of H5 protein a second Lysine (K+) is inserted. It is self-explanatory, that any of the H5 proteins as provided herewith are antigenic, which mean they show antigenic properties in a standard hemagglutinin inhibition assay for influenza viruses.

[0051] According to a further embodiment, the present invention also relates to any part of the H5 protein (1), which means any peptide-fragment which shows antigenic properties in an standard hemagglutinin inhibition assay, having in one embodiment at least the amino acid 223N and the modification 328K+, wherein numbering of the amino acid positions of the H5 protein refers to the amino acid position as exemplarily given in SEQ ID NO:2 and wherein the modification 328K+ means that at amino acid position 328 of H5 protein a second Lysine (K+) is inserted.

[0052] A H5 protein (1) shows antigenic properties if it inhibits hemagglutination in a standard hemagglutinin inhibition assay, for example, as described in Example 2. Normally said antigenic part of H5 protein (1) comprises 200, 180, 160, 150, 140, 130, 120, 110 or most preferably 105 contiguous amino acids of the amino acid sequence that codes for the H5 protein as mentioned above, modified or non-modified, which shows antigenic properties in a standard hemagglutinin inhibition assay as described in Example 2. A standard hemagglutinin inhibition assay for example is also described in Stephenson et al., Virus Research vol. 103, pp. 91-95 (2004) with further references. However, the HI assay as described in Example 2 shall be understood to be the relevant reference assay in connection with all aspects of the invention as described herein:

[0053] Briefly, HI assay was performed to detect the presence of HA-specific antibodies. A heterologous H5N2 virus, A/chicken/Mexico/232/94, was used at a concentration of four hemagglutinating units [4 HA units] in the HI assay. In U-bottomed microtiter plates serial two-fold serum dilutions in PBS were subsequently mixed with equal volumes (25 μL) containing 4 HA units of virus, and incubated at room temperature (about 25° C.) for 30 min Chicken red blood cells, at a concentration of 0.5% in PBS, were added to the serum-virus containing wells and incubated for 40 min at room temperature. The HI titers were determined as reciprocals of the highest serum dilutions in which inhibition of hemagglutination was observed.

[0054] Of note, Haesebrouck and Pensaert (1986) found “that there may exist a correlation between the HI titers against the challenge virus and protection from challenge”. Haesebrouck and Pensaert (1986) also determined that pigs with HI titers of ≧40 were “completely resistant to challenge and no replication of the virus occurred in the respiratory tract at challenge”. Thus, the development of HI titers ≧40 in the vaccinated swine would correlate to protection. (F. Haesebrouck and M. B. Pensaert, 1986). Effect of intratracheal challenge of fattening pigs previously immunized with an inactivated influenza H1N1 vaccine (Veterinary Microbiology, 11 (1986) 239-249. It has to assume that equivalent or at least nearly equivalent H5 HI titers will also result in a complete immune protection of swine against avian influenza virus. Lower titers, at least result in a seroconversion of the vaccinated animals and result in partial immune protection of those animals, which also can dramatically reduce the risk of a pandemic.

[0055] Moreover, an antigenic part of the H5 protein (1) according to the invention includes, but is not limited to deletion mutants of H5 protein, which comprises:
[0056] i. at least 35, 30, 25, 20, 18, 15, 13, 10, 9, or most preferably 8 contiguous amino acids of the amino acid sequence that surrounds and includes the amino acid 223N; and

[0057] ii. at least 35, 30, 25, 20, 18, 15, 13, 10, 9, or most preferably 8 contiguous amino acids of the amino acid sequence that surrounds and includes the amino acid modification 328K+, and
[0058] iii. wherein any of such antigenic part of H5 protein shows hemagglutinin inhibition in a standard hemagglutinin inhibition assay as described in Example 2.

[0059] Preferably, those surrounding amino acids of amino acid 223N and/or 328K+ are encoded by SEQ ID NO:2 or SEQ ID NO:5.

[0060] Furthermore preferred H5 proteins (1) according to the invention are:
[0061] i. any of those mentioned above having the amino acid 223N and the modification 328K+;
[0062] ii. any of those mentioned above having the amino acid 94N/223N and the modification 328K+;
[0063] iii. any H5 protein of avian origin having the amino acid 223N, and the modification 328K+, wherein avian origin means that the H5 sequence derived form a virus isolate that was originally isolated from a poultry infected with avian influenza virus type 5; or
[0064] iv. any H5 protein of avian origin having the amino acids 94N/223N and the modification 328K+, wherein avian origin means that the H5 sequence derived from a virus isolate that was originally isolated from poultry infected with avian influenza virus type 5; or
[0065] v. any H5 protein of avian origin having the amino acids 155N/223N and the modification 328K+, wherein avian origin means that the H5 sequence derived from a virus isolate that was originally isolated from poultry infected with avian influenza virus type 5; or
[0066] vi. any H5 protein of avian origin having the amino acid 120N/155N/223N and the modification 328K+, wherein avian origin means that the H5 sequence derived from a virus isolate that was originally isolated from poultry infected with avian influenza virus type 5; or
[0067] vii. any H5 protein having the modifications 94N/223N and the modification 328K+; or
[0068] viii. any H5 protein having the modifications 94N/155N/223N and the modification 328K+; or;
[0069] ix. any H5 protein having the modifications 94N/120N/155N/223N and the modification 328K+; or
[0070] x. any H5 protein having the modifications 223N, the modification 328K+, and one or more of the following amino acid clusters selected from the group consisting of:
   [0071] a. aa 93-95: GNF
   [0072] b. aa 123-125: SDH
   [0073] c. aa 128-130: SSG
   [0074] d. aa 138-140: GSS
   [0075] e. aa 226-228: MDF
   [0076] f. aa 270-272: EVE
   [0077] g. aa 309-311: NKL; or
[0078] xi. any H5 protein having the amino acid 223N, and the modification 328K+, and one or more of the following amino acid clusters selected from the group consisting of:
   [0079] a. aa 93-95: GNF
   [0080] b. aa 128-130: SSG
   [0081] c. aa 138-140: GSS; or
[0082] xii. any H5 protein having the amino acid sequence of SEQ ID NO:5.

[0083] Furthermore preferred H5 proteins (1) as provided herewith include the H5 proteins as described by Hoffmann et al, PNAS, vol. 106, no. 36, pp. 12915-12920 of Sep. 6, 2005, wherein that H5 proteins includes one or more of the modifications as described above, at least the amino acid 223N and the modification 328K+, wherein numbering of the amino acid positions of the H5 protein refers to the amino acid position as exemplarily given in SEQ ID NO:2 and wherein the modification 328K+ means that at amino acid position 328 of H5 protein a second Lysine (K+) is inserted. The disclosure of this reference shall be entirely included herein by reference.

[0084] Furthermore preferred H5 proteins (1) as provided herewith include H5 proteins which comprise a peptide that comprises the amino acid 223N and the modification 328K+, wherein numbering of the amino acid positions of the H5 protein refers to the amino acid position as exemplarily given in SEQ ID NO:2 and wherein the modification 328K+ means that at amino acid position 328 of H5 protein a second Lysine (K+) is inserted, and:
[0085] i. the amino acid sequences of SEQ ID NO:2, SEQ ID NO:3, SEQ ID NO:4; SEQ ID NO:5; SEQ ID NO:6 or SEQ ID NO:7 or;
[0086] ii. any peptide that has at least 85% sequence homology, more preferably at least about 90% sequence homology, still more preferably at least about 95% sequence homology, even more preferably at least about 97% sequence homology, still even more preferably at least about 98% sequence homology, and even more preferably at least about 99% sequence homology to the polypeptide of i) that comprises hemagglutinin inhibition in a standard hemagglutinin inhibition as described above; or
[0087] iii. any antigenic part of the polypeptides of i) or ii) comprising at least 35, 30, 25, 20, 18, 15, 13, 10, 9, or most preferably 8 contiguous amino acids of any of peptides of i) or ii).
[0088] iv. any peptides of i), ii) or iii) having the amino acids 36T, 36K, 83A, 83T, 83D, 86A, 86V, 120N, 120S, 155N, 155S, 156A, 156T, 189R, 189K, 212K, 212R, 212E, 223N, 223N, or 120N/155N.
[0089] v. any peptide of i), ii), iii) or iv) having one or more of the following amino acid clusters selected from the group consisting of:
   [0090] a. aa 93-95: GNF
   [0091] b. aa 123-125: SDH
   [0092] c. aa 128-130: SSG
   [0093] d. aa 138-140: GSS
   [0094] e. aa 226-228: MDF
   [0095] f. aa 270-272: EVE
   [0096] g. aa 309-311: NKL; or
[0097] vi. any peptide of i), ii) iii) or iv) having one or more of the following amino acid clusters selected from the group consisting of:
   [0098] a. aa 93-95: GNF
   [0099] b. aa 128-130: SSG
   [0100] c. aa 138-140: GSS.

[0101] “Sequence homology”, as used herein, refers to a method of determining the relatedness of two sequences. To determine sequence homology, two or more sequences are optimally aligned, and gaps are introduced if necessary. In contrast to sequence identity, conservative amino acid substitutions are counted as a match when determining sequence homology. In other words, to obtain a polypeptide or polynucleotide having 95% sequence homology with a reference sequence, 85%, preferably 90%, even more preferably 95% of the amino acid residues or nucleotides in the reference sequence must match or comprise a conservative substitution with another amino acid or nucleotide, or a number of amino acids or nucleotides up to 15%, preferably up to 10%, even more preferably up to 5% of the total amino acid residues or nucleotides, not including conservative substitutions, in the reference sequence may be inserted into the reference sequence. Preferably the homolog sequence comprises at least a stretch of 50, even more preferred of 100, even more preferred of 250, even more preferred of 500 nucleotides. Upon such alignment, sequence homology is ascertained on a position-by-position basis, e.g., the sequences are “homolog” at a particular position if at that position, the nucleotides or amino acid residues are identical. The total number of such position identities is then divided by the total number of nucleotides or amino acid residues in the reference sequence to give % sequence homology. Sequence homology can be readily calculated by known methods, including but not limited to, those described in Computational Molecular Biology, Lesk, A. N., ed., Oxford University Press, New York (1988), Biocomputing: Informatics and Genome Projects, Smith, D. W., ed., Academic Press, New York (1993); Computer Analysis of Sequence Data, Part I, Griffin, A. M., and Griffin, H. G., eds., Humana Press, New Jersey (1994); Sequence Analysis in Molecular Biology, von Heinge, G., Academic Press (1987); Sequence Analysis Primer, Gribskov, M. and Devereux, J., eds., M. Stockton Press, New York (1991); and Carillo, H., and Lipman, D., SIAM J. Applied Math., 48: 1073 (1988), the teachings of which are incorporated herein by reference. Preferred methods to determine the sequence homology are designed to give the largest match between the sequences tested. Methods to determine sequence homology are codified in publicly available computer programs which determine sequence identity between given sequences. Examples of such programs include, but are not limited to, the GCG program package (Devereux, J., et al., Nucleic Acids Research, 12(1):387 (1984)), BLASTP, BLASTN and FASTA (Altschul, S. F. et al., J. Molec. Biol., 215:403-410 (1990). The BLASTX program is publicly available from NCBI and other sources (BLAST Manual, Altschul, S. et al., NCVI NLM NIH Bethesda, Md. 20894, Altschul, S. F. et al., J. Molec. Biol., 215:403-410 (1990), the teachings of which are incorporated herein by reference). These programs optimally align sequences using default gap weights in order to produce the highest level of sequence homology between the given and reference sequences.

[0102] Furthermore preferred H5 proteins (1) include H5 proteins which comprise the 328K+ modification as mentioned above, and the amino acid sequence provided in TABLE 1, or any immunogenic part thereof:

TABLE 1
H5 antigens

| | Basic- | Amino acid positions^{#} | | | | | | | | | |
|---|---|---|---|---|---|---|---|---|---|---|---|
| Sequence name | sequence | 36 | 83 | 86 | 120 | 155 | 156 | 189 | 212 | 223 | 263 |
| 223N/328K+ | any HA H5 | — | — | — | — | — | — | — | — | N | — |
| 36T/223N/328K+ | any HA H5 | T | — | — | — | — | — | — | — | N | — |
| 36K/223N/328k+ | any HA H5 | K | — | — | — | — | — | — | — | N | — |
| 83A/223N/328k+ | any HA H5 | — | A | — | — | — | — | — | — | N | — |
| 83T/223N/328k+ | any HA H5 | — | T | — | — | — | — | — | — | N | — |
| 83D/223N/328k+ | any HA H5 | — | D | — | — | — | — | — | — | N | — |
| 86A/223N/328k+ | any HA H5 | — | — | A | — | — | — | — | — | N | — |
| 86V/223N/328k+ | any HA H5 | — | — | V | — | — | — | — | — | N | — |
| 120N/223N/328k+ | any HA H5 | — | — | — | N | — | — | — | — | N | — |
| 120S/223N/328k+ | any HA H5 | — | — | — | S | — | — | — | — | N | — |
| 155N/223N/328k+ | any HA H5 | — | — | — | — | N | — | — | — | N | — |
| 155S/223N/328k+ | any HA H5 | — | — | — | — | S | — | — | — | N | — |
| 156A/223N/328k+ | any HA H5 | — | — | — | — | — | A | — | — | N | — |
| 156T/223N/328k+ | any HA H5 | — | — | — | — | — | T | — | — | N | — |
| 189R/223N/328k+ | any HA H5 | — | — | — | — | — | — | R | — | N | — |
| 189K/223N/328k+ | any HA H5 | — | — | — | — | — | — | K | — | N | — |
| 212K/223N/328k+ | any HA H5 | — | — | — | — | — | — | — | K | N | — |
| 212R/223N/328k+ | any HA H5 | — | — | — | — | — | — | — | R | N | — |
| 212E/223N/328k+ | any HA H5 | — | — | — | — | — | — | — | E | N | — |
| 223N/263A/328k+ | any HA H5 | — | — | — | — | — | — | — | — | N | A |
| 223N/263T/328k+ | any HA H5 | — | — | — | — | — | — | — | — | N | T |
| 120N/155N/223N/328k+ | any HA H5 | — | — | — | N | N | — | — | — | N | — |
| A/duck/China/E319- | AAR99628 | T | A | A | S | D | A | R | K | N | A |
| 2/03/328k+ | | | | | | | | | | | |
| A/duck/China/E319- | AAR99628 | T | A | A | S | D | A | R | K | N | A |
| 2/03_223N/328k+ | | | | | | | | | | | |
| A/duck/China/E319- | AAR99628 | T | A | A | N | D | A | R | K | N | A |
| 2/03_120N/223N/328k+ | | | | | | | | | | | |
| A/duck/China/E319- | AAR99628 | T | A | A | S | N | A | R | K | N | A |
| 2/03_155N/223N/328k+ | | | | | | | | | | | |
| A/duck/China/E319- | AAR99628 | T | A | A | S | N | N | R | K | N | A |
| 2/03_120N/155N/223N/ | | | | | | | | | | | |
| 328k+ | | | | | | | | | | | |
| HA/HK/213/03/328k+ | AY518362 | T | A | A | N | N | A | R | K | N | A |
| HA/Vietnam/1203/04 | | K | T | V | S | S | T | K | R | N | T |
| HA/Vietnam/1203/04_223N/ | | K | T | V | S | S | T | K | R | N | T |
| 328k+ | | | | | | | | | | | |
| HA//Vietnam/3046/04_223N/ | | T | A | V | S | S | T | K | R | N | T |
| 328k+ | | | | | | | | | | | |
| HA/Vietnam/3062/04_223N/ | | T | A | V | S | S | T | K | R | N | T |
| 328k+ | | | | | | | | | | | |
| HA/chicken/Vietnam/ | | T | A | V | S | S | T | K | R | N | T |
| 39/04_223N/328k+ | | | | | | | | | | | |
| HA/falcon/HK- | | T | A | A | S | S | A | K | E | N | A |
| D0028/04_223N/328k+ | | | | | | | | | | | |
| HA/duck/Singapore/3/97_223N/ | | T | D | V | S | N | A | K | E | N | A |
| 328k+ | | | | | | | | | | | |
| HA/HK/156/97/328k+ | | T | A | A | S | S | A | K | E | N | T |

^{#}the amino acid positions given in TABLE 1 refer to the positions as exemplarily defined in SEQ ID NO: 2. In other words amino acid 223 of TABLE 1 refers to the amino acid 223 of the sequence of SEQ ID NO: 2.
— means that the amino acids at this positions are variable as compared to the reference sequence.

[0103] Furthermore, the present invention also relates to H5 proteins (1) having at least the amino acid 223N and the modification 328K+, wherein numbering of the amino acid positions of the H5 protein refers to the amino acid position as exemplarily given in SEQ ID NO:2 and wherein the modification 328K+ means that at amino acid position 328 of H5 protein a second Lysine (K+) is inserted, and comprises:
[0104] i. a peptide having the sequences of NCBI Accession No. AAT65209, CAJ32556, ABC47656, CAF21874, CAF21870, AAC58998, AAC58997, AAC58996, AAC58994, AAC58993, AAC58992, AAC58991, AAC58990, AAC58995, AAS45134, AAN17270, AAN17269, AAN17268, AAN17267, AAN17266, AAN17265, AAN17264, AAN17263, AAN17262, AAN17261, AAN17260, AAN17259, AAN17257, AAN17256, AAN17255, AAN17254, AAA43083, AAA43082, AAB19079, BAE48696, BAE48693, BAE48696, BAE48695, BAE48694, BAE48692, BAE48691, BAE48690, BAE48689, BAE48688, BAE48687, BAE48686, BAE48685, BAE48684, BAE48683, AAC58999, ABC72082, AAV91149, AAP71993, AAP71992, AAP71991, AAP71990, AAP71989, AAP72011, AAP72010, AAP72009, AAP72008, AAP72007, AAP72006, AAP72005, AAP72004, AAP72003, AAP72002, AAP72001, AAP72000, AAP71999, AAP71998, AAP71997, AAP71996, AAP71995, AAP71994, AAF99718, ABF58847, AAG38534, AAC32102, AAC32099, AAL75847, AAC32101, AAC32098, AAC32088, AAC32078, AAR99628, AAC32100, AAM49555, AAL75843, AAL75839, AAD13573, AAD13568, AAF04720, AAF04719, AAC34263, AAR16155, AAD13574, AAD13570, AAD13575, AAD13572, AAD13569, AAD13567, AAD13566, AAK57506, AAG01225, AAG01215, AAG01205, AAG01195, or ABD83813 modified in a manner described above, which means that those sequences include the above-mentioned modifications 223N and 328 K+ which are not part of the wild-type sequences; or
[0105] ii. any peptide that has at least 85% sequence homology, more preferably at least about 90% sequence homology, still more preferably at least about 95% sequence homology, even more preferably at least about 97% sequence homology, still even more preferably at least about 98% sequence homology, and even more preferably at least about 99% sequence homology to the polypeptide of i) and that show hemagglutinin inhibition in a standard hemagglutinin inhibition as described above;
[0106] iii. any of the peptides of i) or ii) having the amino acids 36T, 36K, 83A, 83T, 83D, 86A, 86V, 120N, 120S, 155N, 155S, 156A, 156T, 189R, 189K, 212K, 212R, 212E, 263A, 263T, or 120N/155N; or
[0107] iv. any of such peptides of i), ii), or iii) having one or more of the following amino acid clusters selected from the group consisting of:
   [0108] a. aa 93-95: GNF
   [0109] b. aa 123-125 SDH
   [0110] c. aa 128-130: SSG
   [0111] d. aa 138-140: GSS
   [0112] e. aa 226-228: MDF
   [0113] f. aa 270-272: EVE
   [0114] g. aa 309-311: NKL; or
[0115] v. any peptide of i), ii) iii) or iv) having one or more of the following amino acid clusters selected from the group consisting of:
   [0116] a. aa 93-95: GNF
   [0117] b. aa 128-130: SSG
   [0118] c. aa 138-140: GSS

[0119] Preferably, the H5 protein (1) for use in a method of treating or preventing infections with H5N1 virus of a different clade is recombinantly expressed and/or produced by a baculovirus expression system, preferably in cultured insect cells.

[0120] The term “H5 protein (1)” as mentioned herein is thus, in particular, equivalent to the term “recombinant H5 protein” used herein.

[0121] Regarding the H5N1 virus of a different clade, as mentioned herein, said H5N1 virus of a different clade is preferably selected from the group consisting of clade 0 H5N1 virus, clade 2 H5N1 virus, clade 3 H5N1 virus, clade 4 H5N1 virus, clade 5 H5N1 virus, clade 6 H5N1 virus, clade 7 H5N1 virus, clade 8 H5N1 virus and clade 9 H5N1 virus.

[0122] In a further preferred embodiment of the invention, the H5N1 virus of a different clade is a clade 2.2 H5N1 virus or a clade 2.3 H5N1 virus.

[0123] In a particular preferred embodiment of the invention, the H5N1 virus of a different clade is a clade 2.2.1 H5N1 virus or a clade 2.3.2 H5N1 virus.

[0124] For reasons of clarity, H5 protein of the H5N1 virus of a different clade is termed “H5 protein (2)” hereinafter. Hence, H5 protein (2) as mentioned herein is in particular a H5 protein coded by the genome of a H5N1 of any clade with the exception of clade 1.

[0125] In still a further preferred embodiment, the H5N1 virus of a different clade is a H5N1 virus of North African or of Vietnamese origin, wherein said H5N1 virus of North African origin is preferably a H5N1 virus comprising a H5 protein (2) of influenza virus, wherein said H5 protein (2) has
[0126] (a) the amino acids 113D, 126H, 145(−), 156R, 160F, 167T, and 181N, wherein the modification 145(−) means that amino acid position 145 of H5 is deleted, or
[0127] (b) the amino acids 87P, 145L, 172T, 201E, 206I, 208K, 254T, 341G and 421K, or
[0128] (c) the amino acids 145L, 172T, and 254V,
   and wherein the numbering of the amino acid positions of the H5 protein (2) refers to the amino acid position as exemplarily given in SEQ ID NO:8;
   or wherein said H5 protein (2) consists of or comprises an amino acid sequence which is at least 95%, preferably at least 96%, more preferably at least 97%, still more preferably at least 98%, yet more preferably at least 99%, or in particular preferred 100% homolog with any one of the sequences as set forth in SEQ ID NOs: 62 to 137 or 9 to 46.

[0129] In yet a further preferred embodiment, the H5N1 virus of a different clade is a H5N1 virus of North African or of Vietnamese origin, wherein said H5N1 virus of North African origin is preferably a H5N1 virus comprising a polynucleotide encoding a H5 protein (2) of influenza virus, wherein said H5 protein (2) has
[0130] (a) the amino acids 113D, 126H, 145(−), 156R, 160F, 167T, and 181N, wherein the modification 145(−) means that amino acid position 145 of H5 is deleted, or
[0131] (b) the amino acids 87P, 145L, 172T, 201E, 206I, 208K, 254T, 341G and 421K, or
[0132] (c) the amino acids 145L, 172T, and 254V,
   and wherein the numbering of the amino acid positions of the H5 protein (2) refers to the amino acid position as exemplarily given in SEQ ID NO:8;
   or wherein said H5 protein (2) consists of or comprises an amino acid sequence which is at least 95%, preferably at least 96%, more preferably at least 97%, still more preferably at least 98%, yet more preferably at least 99%, or in particular preferred 100% homolog with any one of the sequences as set forth in SEQ ID NOs: 62 to 137 or 9 to 46.

[0133] In the context of the invention, said H5 protein (2) according to (a) is a Subclade A protein, and said H5 protein according to (b) or (c) is a Subclade B protein.

[0134] It is thus understood that such a H5 protein (2) of North African origin could be, for example, a sequence as set forth in SEQ ID NO: 140, which corresponds to SEQ ID NO: 8 without signal peptide (the N-terminal 16 amino acid residues of SEQ ID NO: 8 are not included in SEQ ID NO: 140), and thus starts with the N-terminal amino acid D17, but wherein said sequence has
[0135] (a) the amino acids 113D, 126H, 145(−), 156R, 160F, 167T, and 181N, wherein the modification 145(−) means that amino acid position 145 of H5 is deleted, or
[0136] (b) the amino acids 87P, 145L, 172T, 201E, 206I, 208K, 254T, 341G and 421K, or
[0137] (c) the amino acids 145L, 172T, and 254V,
   wherein the numbering as exemplarily given in SEQ ID NO:8 is used.

[0138] As described herein it is understood that the term “H5N1 virus comprising a polynucleotide encoding a H5 protein (2)” is equivalent to “H5N1 virus comprising a polynucleotide which comprises a sequence encoding a H5 protein (2)” or to “H5N1 virus comprising a polynucleotide comprising a sequence which encodes a H5 protein (2)”, respectively.

[0139] Within the context of the invention, it is understood that the term “amino acid” in particular refers to an amino acid residue or, respectively, to an amino acid which has been covalently linked via peptide bonds to two further amino acids or, if the amino acid is N- or C-terminally located in the peptide sequence, to one further amino acid.

[0140] The H5 protein (2), as described herein, in particular consists of or comprises an amino acid sequence which is at least 95%, preferably 96%, more preferably 97%, still more preferably 98%, yet more preferably 99% or in particular preferably 100% homologous with any one of the sequences as set forth in SEQ ID NOs: 9 to 47. Preferably, the H5 protein (2) consists of or comprises an amino acid sequence which is at least 95%, preferably 96%, more preferably 97%, still more preferably 98%, yet more preferably 99% or in particular preferably 100% homologous with any one of the sequences as set forth in SEQ ID NOs: 15, 20, or 47. In particular, H5 proteins (2) that comprise or consist of the amino acid sequence set forth in SEQ ID NO: 20 are preferred.

[0141] In one preferred embodiment, the H5 protein (2), as described herein, has the amino acid 239N. The term “239N” exemplarily means, that the amino acid at position 239—numbering according to the amino acid positions of SEQ ID NO:8—shall code for the amino acid Asparagine (N). In other words, if reference is made to “H5 protein (2) having the amino acid 239N”, a H5 amino acid molecule that normally codes for Serine at amino acid position 239—numbering according to the amino acid positions of SEQ ID NO:8—that amino acid shall be substituted by an Asparagine (N).

[0142] In a particular preferred embodiment, the H5 protein (2), as described herein, does not comprise the influenza A H5N1 hemagglutinin signal sequence, wherein the H5 protein (2) influenza A H5N1 hemagglutinin signal sequence preferably comprises or consists of the first 16 N-terminal amino acids (one letter code) MEKIVLLLAIVSLVKS (SEQ ID NO:51) or M1 E2 K3 I4 V5 L6 L7 L8 A9 I10 V11 S12 L13 V14 K15 S16, respectively, wherein the numbering of said first N-terminal 16 amino acid positions refers to the amino acid positions 1 to 16 as exemplarily given in SEQ ID NO 8, namely referring to the sequence (three letter code) Met Glu Lys Ile Val Leu Leu Leu Ala Ile Val Ser Leu Val Lys Ser (SEQ ID NO:51) as set forth in SEQ ID NO:8.

[0143] In a further preferred embodiment the H5 protein (2), as described herein, thus consists of or comprises an amino acid sequence which is at least 95%, preferably 96%, more preferably 97%, still more preferably 98%, yet more preferably 99% or in particular preferably 100% homologous with any one of the sequences as set forth in SEQ ID NOs: 9 to 47, wherein the sequences as set forth in SEQ ID NOs: 9 to 47 start with amino acid D17, and wherein the numbering of the first N-terminal amino acid position (D17) refers to the amino acid position 17 as exemplarily given in SEQ ID NO 8.

[0144] Table B provides the respective sequences SEQ ID NOs: 62 to 99 that correspond to variants of the sequences as set forth in SEQ ID NOs: 9 to 46, wherein SEQ ID NOs: 62 to 99 start with the respective amino acid D17 of SEQ ID NOs: 9 to 46, as mentioned herein, and Table D provides the respective variant of sequence SEQ ID NO: 47, i.e. SEQ ID NO: 138, wherein the variant sequence starts with amino acid D17, as mentioned herein.

[0145] In one example, the H5 protein (2), as described herein, thus preferably consists of or comprises an amino acid sequence which is at least 95%, preferably 96%, more preferably 97%, still more preferably 98%, yet more preferably 99% or in particular preferably 100% homologous with the polypeptide sequence DQICIGYHANNSTEQVDTIMEKNVTVTHAQDILEKTHNGKLCNLDGVKPLILRDCSV AGWLLGNPMCDEFLNVPEWSYIVEKINPTNDLCYPGNFNDYEELKHLLSRINHFEKI QIIPKNSWSDHEASGVSSACPYQGRSSFFRNVVWLTKKNNAYPTIKKSYNNTNQEDL LVLWGIHHPNDAAEQTRLYQNPTTYISVGTSTLNQRLVPKIATRSKVNGQSGRMEFF WTILKSNDAINFESNGNFIAPENAYKIVKKGDSTIMKSELEYGDCNTKCQTPIGAINSS MPFHNIHPLTIGECPKYVKSNRLVLATGLRNSPQGERRRKKRGLFGAIAGFIEGGWQ GMVDGWYGYHHSNEQGSGYAADKESTQKAIDGVTNKVNSIIDKMNTQFEAVGREF NNLERRIENLNKKMEDGFLDVWTYNAELLVLMENERTLDFHDSNVKNLYDKVRLQ LRDNAKELGNGCFEFYHRCDNECMESVRNGTYDYPQYSEEARLKREEISGVKLESIG TYQILSIYSTVASSLALAIMV (SEQ ID NO:52), wherein this sequence corresponds to a variant of SEQ ID NO:15, wherein the variant starts with amino acid D17 of SEQ ID NO: 15, wherein the numbering of the N-terminal amino acid position (D17) refers to the amino acid position 17 as exemplarily given in SEQ ID NO 8.

[0146] In another example, the H5 protein (2), as described herein, thus preferably consists of or comprises an amino acid sequence which is at least 95%, preferably 96%, more preferably 97%, still more preferably 98%, yet more preferably 99% or in particular preferably 100% homologous with the polypeptide sequence DQICIGYHANNSTEQVDTIMEKNVTVTHAQDILEKTHNGKLCDLGGVKPLILRDCSV AGWLLGNPMCDEFPNVSEWSYIVEKINPANDLCYPGNFNNYEELKHLLSRINRFEKI QIIPKSSWPDHEASLGVSSAC PYQGGPSFYRNVVWLIKKNDTYPTIKESYHNTNQEDL LVLWGIHHPNNEEEQKRIYKNPTTYVSVGTSTLNQRLVPKIATRSKVNGQSGRVEFF WTILKSNDTINFESNGNFIAPENAYKIVKKGDSTIMKSELEYGNCSTKCQTPIGAINTS MPFHNIHPLTIGECPKYVKSNRLVLATGLRNSPQGEGRRKKRGLFGAIAGFIEGGWQ GMVDGWYGYHHSNEQGSGYAADKESTQKAIDGVTNKVNSIIDKMNTQFEAVGREF NNLEKRIENLNKKMEDGFLDVWTYNAELLVLMENERTLDFHDSNVRNLYDKVRLQ LRDNAKELGNGCFEFYHRCDNECMESVRNGTYDYPQYSEEARLKREEISGVKLESIG TYQILSIYSTVASSLALAIMVAGLFLWMCSNGSLQCRICI, (SEQ ID NO: 53) wherein the sequence corresponds to SEQ ID NO:20 starting with amino acid D17, and wherein the numbering of the first N-terminal amino acid position (D17) refers to the amino acid position 17 as exemplarily given in SEQ ID NO: 8.

[0147] It is thus understood, that the term “variants of SEQ ID NOs: 9 to 47” is preferably also directed to the variant sequences that start with amino acid D17 of SEQ ID NOs: 9 to 47, and wherein the variant sequences of SEQ ID NOs 9 to 46 starting with amino acid D17 are given in Table B and correspond to SEQ ID NOs: 62 to 99, and wherein the sequence of SEQ ID NO: 47 starting with amino acid D17 has the sequence DQICIGYHANNSTEQVDTIMEKNVTVTHAQDILEKTHNGKLCDLDGVKPLILRDCSV AGWLLGNPMCDEFPNVSEWSYIVEKINPANDLCYPGNFNNYEELKHLLSRINRFEKI QIIPKSSWPDHEASLGVSSAC PYQGGPSFYRNVVWLIKKNNTYPTIKESYHNTNQEDL LVLWGIHHPNDEEEQTRIYKNPTTYISVGTSTLNQRLVPKIATRSKVNGQSGRVEFFW TILKSNDTINFESNGNFIAPENAYKIVKKGDSTIMKSELEYGNCNTKCQTPIGAINSSM PFHNIHPLTIGECPKYVKSNRLVLATGLRNSPQGEGRRKKRGLFGAIAGFIEGGWQG MVDGWYGYHHSNEQGSGYAADKESTQKAIDGVTNKVNSIIDKMNTQFEAVGREFN NLEKRIENLNKKMEDGFLDVWTYNAELLVLMENERTLDFHDSNVKNLYDKVRLQL RDNAKELGNGCFEFYHRCDNECMESVRNGTYDYPQYSEEARLKREEISGVKLESIGT YQILSIYSTVASSLALAIMVAGLFLWMCSNGSLQCRICI (SEQ ID NO: 54).

[0148] In a further preferred embodiment the H5 protein (2), as described herein, comprises a full length C-terminal sequence, wherein the full length C-terminal sequence preferably corresponds to amino acids 527 to 568, wherein the numbering of said amino acid positions refers to the amino acid positions 527 to 568 as exemplarily given in SEQ ID NO 47. The full length C-terminal sequence is thus preferably the sequence IGTYQILSIYSTVASSLALAIMVAGLFLWMCSNGSLQCRICI (SEQ ID NO: 55), wherein in a further preferred embodiment the Phenyl alanine residue (F) is a Serine (S) residue or wherein in another preferred embodiment the sequence IMVA (SEQ ID NO: 56) is substituted by the sequence IMMA (SEQ ID NO: 57). Hence the full length C-terminal sequence is thus preferably the sequence: IGTYQILSIYSTVASSLALAIMVAGLFLWMCSNGSLQCRICI (SEQ ID NO: 58) or the sequence IGTYQILSIYSTVASSLALAIMVAGLSLWMCSNGSLQCRICI (SEQ ID NO: 59) or the sequence IGTYQILSIYSTVASSLALAIMMAGLSLWMCSNGSLQCRICI (SEQ ID NO: 60).

[0149] In yet a further preferred embodiment the H5 protein (2), as described herein, thus consists of or comprises an amino acid sequence which is at least 95%, preferably 96%, more preferably 97%, still more preferably 98%, yet more preferably 99% or in particular preferably 100% homologous with any one of the sequences as set forth in SEQ ID NOs: 9 to 47, sequences as set forth in SEQ ID NOs: 54, 100-137 that correspond to variants of SEQ ID NOs: 9 to 47 that start with amino acid D17 and additionally comprise a full length C-terminal sequence, wherein the numbering of the first N-terminal amino acid position (D17) refers to the amino acid position 17 as exemplarily given in SEQ ID NO 8, and wherein the full length C-terminal sequence corresponds to amino acids 527 to 568, wherein the numbering of these amino acid positions refers to the amino acid positions 527 to 568 as exemplarily given in SEQ ID NO 47.

[0150] Table C provides the respective sequences SEQ ID NOs 100 to 137, wherein the sequences start with amino acid D17 and comprise a full-length C-terminal sequence, as described herein, and Table D provides the respective sequence SEQ ID NO: 138, wherein the sequence starts with amino acid D17 of SEQ ID NO: 47 and comprises a full-length C-terminal sequence, as described herein.

[0151] In one example, the H5 protein (2), as described herein, thus preferably consists of or comprises an amino acid sequence which is at least 95%, preferably 96%, more preferably 97%, still more preferably 98%, yet more preferably 99% or in particular preferably 100% homologous with the polypeptide sequence DQICIGYHANNSTEQVDTIMEKNVTVTHAQDILEKTHNGKLCNLDGVKPLILRDCSV AGWLLGNPMCDEFLNVPEWSYIVEKINPTNDLCYPGNFNDYEELKHLLSRINHFEKI QIIPKNSWSDHEASGVSSACPYQGRSSFFRNVVWLTKKNNAYPTIKKSYNNTNQEDL LVLWGIHHPNDAAEQTRLYQNPTTYISVGTSTLNQRLVPKIATRSKVNGQSGRMEFF WTILKSNDAINFESNGNFIAPENAYKIVKKGDSTIMKSELEYGDCNTKCQTPIGAINSS MPFHNIHPLTIGECPKYVKSNRLVLATGLRNSPQGERRRKKRGLFGAIAGFIEGGWQ GMVDGWYGYHHSNEQGSGYAADKESTQKAIDGVTNKVNSIIDKMNTQFEAVGREF NNLERRIENLNKKMEDGFLDVWTYNAELLVLMENERTLDFHDSNVKNLYDKVRLQ LRDNAKELGNGCFEFYHRCDNECMESVRNGTYDYPQYSEEARLKREEISGVKLESIG TYQILSIYSTVASSLALAIMVAGLFLWMCSNGSLQCRICI (SEQ ID NO:52), wherein said sequence corresponds to SEQ ID NO:15 starting with amino acid D17, and additionally comprising a full length C-terminal sequence, wherein the numbering of said first N-terminal amino acid position (D17) refers to the amino acid position 17 as exemplarily given in SEQ ID NO 8, and wherein the full length C-terminal sequence corresponds to amino acids 527 to 568, more particular to amino acids 534 to 568, wherein the numbering of said amino acid positions refers to the amino acid positions 527 to 568, or more particular to amino acid positions 534 to 568, as exemplarily given in SEQ ID NO 47. Herein, this sequence, SEQ ID NO:52 and sequences having different C-terminal sequences may be referred to as a “variant of SEQ ID NO:15”.

[0152] It is thus further understood, that the term “variants of SEQ ID NOs 9 to 47” is preferably also directed to the sequences SEQ ID NOs: 9 to 47 starting with amino acid D17 and having the full length C-terminal sequence, and wherein said sequences SEQ ID No 9 to 46 starting with amino acid D17 and having the full length C-terminal sequence are given in Table C, and said sequence SEQ ID NO: 47 starting with amino acid D17 and having the full length C-terminal sequence is given in Table D.

[0153] The terms “variant sequences as set forth in SEQ ID NOs: 9 to 47” or “variant sequences of SEQ ID NOs: 9 to 47”, as used herein, preferably also relate to the sequences as set forth in Table B or Table C, respectively, and, additionally the sequence as set forth in Table D, respectively.

[0154] In a still more preferred embodiment of the invention, the H5N1 virus of a different clade comprises H5 protein (2) having
[0155] (a) the amino acids 87L, 113D, 126H, 145(−), 156R, 160F, 167T, and 181N, or
[0156] (b) the amino acids 87P, 113N, 126R, 145L, 160Y, 172T, 181H, 201E, 206I, 208K, 254T, 341G and 421K, or
[0157] (c) the amino acids 87L, 113N, 126R, 145L, 156G, 160Y, 172T, 181H, and 254V,
   and/or wherein such H5 protein (2) comprises a peptide that comprises:
[0158] i. any one of the amino acid sequences of SEQ ID NOs: 62 to 137 or 9 to 46;
[0159] ii. any peptide that has at least 85%, preferably at least 95%, even more preferably at least 96%, even more preferably at least 97%, even more preferably at least 98%, even more preferably at least 99%, most preferably 100% sequence homology to the polypeptide of i) and that comprises hemagglutinin inhibition in a standard hemagglutinin inhibition assay; or
[0160] iii. any part of the polypeptides of i) or ii) comprising at least 334 contiguous amino acids of any of such peptides of i) or ii) and wherein any of such peptide comprises hemagglutinin inhibition in a standard hemagglutinin inhibition assay,
   and/or wherein such H5 protein (2) consists of or comprises a contiguous amino acid sequence which has at least 95% even more preferably at least 96%, even more preferably at least 97%, even more preferably at least 98%, even more preferably at least 99%, most preferably 100% sequence identity with any one of the sequences as set forth in SEQ ID NOs: 62 to 137 or 9 to 46.

[0161] In a yet more preferred embodiment of the invention, the H5N1 virus of a different clade comprises a polynucleotide encoding a H5 protein (2) having:
[0162] (a) the amino acids 87L, 113D, 126H, 145(−), 156R, 160F, 167T, and 181N, or
[0163] (b) the amino acids 87P, 113N, 126R, 145L, 160Y, 172T, 181H, 201E, 206I, 208K, 254T, 341G and 421K, or
[0164] (c) the amino acids 87L, 113N, 126R, 145L, 156G, 160Y, 172T, 181H, and 254V,
   and/or wherein such H5 protein (2) comprises a peptide that comprises:
[0165] i. any one of the amino acid sequences of SEQ ID NOs: 62 to 137 or 9 to 46;
[0166] ii. any peptide that has at least 85%, preferably at least 95%, even more preferably at least 96%, even more preferably at least 97%, even more preferably at least 98%, even more preferably at least 99%, most preferably 100% sequence homology to the polypeptide of i) and that comprises hemagglutinin inhibition in a standard hemagglutinin inhibition assay; or
[0167] iii. any part of the polypeptides of i) or ii) comprising at least 334 contiguous amino acids of any of such peptides of i) or ii) and wherein any of such peptide comprises hemagglutinin inhibition in a standard hemagglutinin inhibition assay,
   and/or wherein such H5 protein (2) consists of or comprises a contiguous amino acid sequence which has at least 95% even more preferably at least 96%, even more preferably at least 97%, even more preferably at least 98%, even more preferably at least 99%, most preferably 100% sequence identity with any one of the sequences as set forth in SEQ ID NOs: 62 to 137 or 9 to 46.

[0168] More particular, the H5N1 virus of a different clade preferably comprises H5 protein (2) which consists of or comprises an amino acid sequence which is at least 95%, preferably at least 96%, more preferably at least 97%, still more preferably at least 98%, yet more preferably at least 99%, or in particular preferred 100% homolog with any one of the sequences as set forth in SEQ ID NOs: 68, 73, 106, 111, 15, or 20, and wherein such H5 protein (2) comprising or consisting of the amino acid sequence set forth in SEQ ID NO: 73, 111, or 20 are in particular more preferred.

[0169] Preferably, the H5N1 virus of a different clade in particular comprises a polynucleotide encoding a H5 protein (2) which consists of or comprises an amino acid sequence which is at least 95%, preferably at least 96%, more preferably at least 97%, still more preferably at least 98%, yet more preferably at least 99%, or in particular preferred 100% homolog with any one of the sequences as set forth in SEQ ID NOs: 68, 73, 106, 111, 15, or 20, and wherein such H5 protein (2) comprising or consisting of the amino acid sequence set forth in SEQ ID NO: 73, 111, or 20 are in particular more preferred.

[0170] In particular, the present invention is directed to the H5 protein (1) described herein for use in a method of treating or preventing infections
[0171] (A) with Subclade A H5N1 virus of North African origin, namely an infection with a H5N1 virus comprising a H5 protein (2) having the amino acids according to alternative (a) as described herein, in particular according to (a) of claim 15 or 16, or comprising a H5 protein according to claim 15, 16 or 17 relating to any one of the sequences as set forth in SEQ ID NOs: 62 to 72, 100 to 110, 9 to 19, or 95 or 96, 133 or 134, 42 or 43, or
[0172] (B) with Subclade B H5N1 virus of North African origin, namely an infection with a H5N1 virus comprising a H5 protein having the amino acids according to alternative (b) or (c) as described herein, in particular according to (b) or (c) of claim 15 or 16, or comprising a H5 protein according to claim 15, 16 or 17 relating to any one of the sequences as set forth in SEQ ID NOs: 82 to 94, 111 to 132, 20 to 41, or 97 to 99, 135 to 137, or 44 to 46.

[0173] Particularly, the present invention is directed to the H5 protein (1) described herein for use in a method of treating or preventing infections
[0174] (A) with Subclade A H5N1 virus of North African origin, namely an infection with a H5N1 virus comprising a polynucleotide encoding a H5 protein (2) having the amino acids according to alternative (a) as described herein, in particular according to (a) of claim 15 or 16, or an infection with a H5N1 virus comprising a polynucleotide encoding a H5 protein (2) according to claim 15, 16 or 17 relating to any one of the sequences as set forth in SEQ ID NOs: 62 to 72, 100 to 110, 9 to 19, or 95 or 96, 133 or 134, 42 or 43, or
[0175] (B) with Subclade B H5N1 virus of North African origin, namely an infection with a H5N1 virus comprising a polynucleotide encoding a H5 protein (2) having the amino acids according to alternative (b) or (c) as described herein, in particular according to (b) or (c) of claim 15 or 16, or an infection with a H5N1 virus comprising a polynucleotide encoding a H5 protein (2) according to claim 15, 16 or 17 relating to any one of the sequences as set forth in SEQ ID NOs: 82 to 94, 111 to 132, 20 to 41, or 97 to 99, 135 to 137, or 44 to 46.

[0176] According to a further embodiment, the present invention also relates to nucleic acid molecules, which code for any of the H5 proteins (1), as described supra, for use in a method of treating or preventing infections with H5N1 virus of a different clade. Preferably, those nucleic acid molecules are RNA, DNA or copy cDNA molecules. Thus, the present invention relates to a nucleic acid molecule, preferably a cDNA molecule coding for a H5 protein or any modified forms of H5 protein, including any deletion, substitution and/or insertion mutant of H5 protein, wherein those H5 proteins having the amino acid 223N and the modification 328K+, wherein numbering of the amino acid positions of the H5 protein refers to the amino acid position as exemplarily given in SEQ ID NO:2 and wherein the modification 328K+ means that at amino acid position 328 of H5 protein a second Lysine (K+) is inserted.

[0177] According to a further embodiment, the present invention also relates to a nucleic acid molecule, preferably a cDNA molecule coding for any part of the H5 protein (1), which means encoding for any peptide-fragment which shows antigenic properties in an standard hemagglutinin inhibition assay as described supra, and having at least the amino acid 223N and the modification 328K+, wherein numbering of the amino acid positions of the H5 protein refers to the amino acid position as exemplarily given in SEQ ID NO:2 and wherein the modification 328K+ means that at amino acid position 328 of H5 protein a second Lysine (K+) is inserted. Normally such nucleic acid molecules, which code for an antigenic part of H5 protein, comprise 600, 540, 480, 450, 420, 390, 360, 330 or most preferably 315 contiguous nucleotides of the nucleotide sequence that codes for the H5 protein as mentioned above, modified or non-modified, and which shows antigenic properties in a standard hemagglutinin inhibition assay as described herein.

[0178] Further embodiments of antigenic parts of the H5 protein (1) are described supra. It is in the common knowledge of a person skilled in the art to construct any such nucleic acid molecules, preferably cDNA molecules which codes for the antigenic part of the H5 protein as described supra. This also include but is not limited to the construction of nucleic acid molecules, preferably of cDNA molecules, which codes for antigenic parts of the H5 protein as mentioned above including deletion mutants of H5 protein, which comprises:
[0179] i. at least 105, 90, 75, 60, 48, 45, 39, 30, 27, or most preferably 24 contiguous amino nucleotides of the nucleotide sequence that surrounds and includes the coding sequence that codes for amino acid 223N; and
[0180] ii. at least 105, 90, 75, 60, 48, 45, 39, 30, 27, or most preferably 24 contiguous amino nucleotides of the nucleotide sequence that surrounds and includes the coding sequence that codes for modification 328K+, and
[0181] iii. wherein any of such antigenic part of H5 protein show hemagglutinin inhibition in a standard hemagglutinin inhibition assay as described in Example 2.

[0182] Preferably, those surrounding nucleotides of the nucleotides, which code for amino acids 223N and/or 328K+, coding for SEQ ID NO:2 or SEQ ID NO:5.

[0183] Furthermore preferred nucleic acid molecules encoding for the H5 protein (1) according to the invention are:
[0184] i. any of those mentioned supra encoding for the amino acid 223N and the modification 328K+;
[0185] ii. any of those mentioned supra encoding for the amino acid 94N/223N and the modification 328K+;
[0186] iii. any nucleic acid molecules of avian origin encoding for the amino acid 223N, and the modification 328K+, wherein avian origin means that the H5 sequence derived from a virus isolate that was originally isolated from poultry infected with avian influenza virus type 5; or
[0187] iv. any nucleic acid molecules of avian origin encoding for the amino acids 94N/223N and the modification 328K+, wherein avian origin means that the H5 sequence derived from a virus isolate that was originally isolated from poultry infected with avian influenza virus type 5; or.
[0188] v. any nucleic acid molecules of avian origin encoding for the amino acids 155N/223N and the modification 328K+, wherein avian origin means that the H5 sequence derived from a virus isolate that was originally isolated from poultry infected with avian influenza virus type 5; or
[0189] vi. any nucleic acid molecule encoding for H5 protein of avian origin having the amino acid 120N/155N/223N and the modification 328K+, wherein avian origin means that the H5 sequence derived from a virus isolate that was originally isolated from poultry infected with avian influenza virus type 5; or
[0190] vii. any nucleic acid molecule encoding for H5 protein having the modifications

[0191] 94N/223N and the modification 328K+; or
[0192] viii. any nucleic acid molecule encoding for H5 protein having the modifications

[0193] 94N/155N/223N and the modification 328K+; or;
[0194] ix. any nucleic acid molecule encoding for H5 protein having the modifications 94N/120N/155N/223N and the modification 328K+; or
[0195] x. any nucleic acid molecule encoding for H5 protein having the modifications 223N, the modification 328K+, and one or more of the following amino acid clusters selected from the group consisting of:
   [0196] a. aa 93-95: GNF
   [0197] b. aa 123-125: SDH
   [0198] c. aa 128-130: SSG
   [0199] d. aa 138-140: GSS
   [0200] e. aa 226-228: MDF
   [0201] f. aa 270-272: EVE
   [0202] g. aa 309-311: NKL; or
[0203] xi. any nucleic acid molecule encoding for H5 protein having the amino acid 223N, the modification 328K+, and one or more of the following amino acid clusters selected from the group consisting of:
   [0204] a. aa 93-95: GNF
   [0205] b. aa 128-130: SSG
   [0206] c. aa 138-140: GSS; or
[0207] xii. any nucleic acid molecule encoding for H5 protein having the amino acid sequence of SEQ ID NO:5.

[0208] Furthermore preferred H5 proteins (1) as provided herewith include the H5 proteins as described by Hoffmann et al, PNAS, vol. 106, no. 36, pp. 12915-12920 of Sep. 6, 2005, wherein that H5 proteins includes one or more of the modifications as described above, at least the amino acid 223N and the modification 328K+, wherein numbering of the amino acid positions of the H5 protein refers to the amino acid position as exemplarily given in SEQ ID NO:2 and wherein the modification 328K+ means that at amino acid position 328 of H5 protein a second Lysine (K+) is inserted. The disclosure of this reference shall be entirely included herein by reference. Thus according to a further embodiments, the present invention also relates to any nucleic acid molecule, preferably a cDNA molecule coding for any of such proteins described by Hoffmann et al, PNAS, vol. 106, no. 36, pp. 12915-12920 of Sep. 6, 2005, wherein that H5 proteins includes one or more of the modifications as described above, at least the amino acid 223N and the modification 328K+, wherein numbering of the amino acid positions of the H5 protein refers to the amino acid position as exemplarily given in SEQ ID NO:2 and wherein the modification 328K+ means that at amino acid position 328 of H5 protein a second Lysine (K+) is inserted.

[0209] Methods, of how to introduce any of the above-mentioned modifications within the nucleotide sequence, including the encoding sequence of the H5 protein of an influenza virus, are well known in the art. The genomic sequence of the entire influenza virus can be modified according to the invention, for example according to the methods described in U.S. Pat. No. 6,951,754, with further references.

[0210] Furthermore, there may be employed conventional molecular biology, microbiology, and recombinant DNA techniques within the skill of the art to modify a nucleic acid sequence coding for an antigen as described herein. Such techniques are explained fully in the literature. See, e.g., Sambrook et al., Molecular Cloning: A Laboratory Manual, Second Edition (1989) Cold Spring Harbor Laboratory Press, Cold Spring Harbor, N.Y.; DNA Cloning: A Practical Approach, Volumes I and II (D. N. Glover ed. 1985); Oligonucleotide Synthesis (M. J. Gait ed. 1984); Nucleic Acid Hybridization [B. D. Hames & S. J. Higgins eds. (1985)]; Transcription And Translation [B. D. Hames & S. J. Higgins, eds. (1984)]; Animal Cell Culture [R. I. Freshney, ed. (1986)]; Immobilized Cells And Enzymes [IRL Press, (1986)]; B. Perbal, A Practical Guide To Molecular Cloning (1984); F. M. Ausubel et al. (eds.), Current Protocols in Molecular Biology, John Wiley & Sons, Inc. 1994).

[0211] According to a further embodiment, the present invention also relates to a vector that comprises any of such nucleic acid molecules as described supra. In other words, the present invention relates to a vector that includes the coding sequence of any such H5 protein (1), or part thereof as described supra. Preferably, said vector is an expression vector, which allows the expression of any such H5 protein (1) or part thereof as described supra. Vectors according to the invention are those which are suitable for the transfection or infection of bacterial, yeast or animal cells, in vitro or in vivo.

[0212] Vectors and methods for making and/or using vectors (or recombinants) for expression can be by or analogous to the methods disclosed in: U.S. Pat. Nos. 4,603,112, 4,769,330, 5,174,993, 5,505,941, 5,338,683, 5,494,807, 4,722,848, 5,942,235, 5,364,773, 5,762,938, 5,770,212, 5,942,235, 382,425, PCT publications WO 94/16716, WO 96/39491, WO 95/30018, Paoletti, “Applications of pox virus vectors to vaccination: An update, “PNAS USA 93: 11349-11353, October 1996, Moss, “Genetically engineered poxviruses for recombinant gene expression, vaccination, and safety,” PNAS USA 93: 11341-11348, October 1996, Smith et al., U.S. Pat. No. 4,745,051, (recombinant baculovirus), Richardson, C. D. (Editor), Methods in Molecular Biology 39, “Baculovirus Expression Protocols” (1995 Humana Press Inc.), Smith et al., “Production of Human Beta Interferon in Insect Cells Infected with a Baculovirus Expression Vector”, Molecular and Cellular Biology, December, 1983, Vol. 3, No. 12, p. 2156-2165; Pennock et al., “Strong and Regulated Expression of Escherichia coli B-Galactosidase in Infect Cells with a Baculovirus vector, “Molecular and Cellular Biology March 1984, Vol. 4, No. 3, p. 399-406; EPAO 370 573, U.S. application No. 920,197, filed Oct. 16, 1986, EP Patent publication No. 265785, U.S. Pat. No. 4,769,331 (recombinant herpesvirus), Roizman, “The function of herpes simplex virus genes: A primer for genetic engineering of novel vectors,” PNAS USA 93:11307-11312, October 1996, Andreansky et al., “The application of genetically engineered herpes simplex viruses to the treatment of experimental brain tumors,” PNAS USA 93: 11313-11318, October 1996, Robertson et al. “Epstein-Barr virus vectors for gene delivery to B lymphocytes”, PNAS USA 93: 11334-11340, October 1996, Frolov et al., “Alphavirus-based expression vectors: Strategies and applications,” PNAS USA 93: 11371-11377, October 1996, Kitson et al., J. Virol. 65, 3068-3075, 1991; U.S. Pat. Nos. 5,591,439, 5,552,143, WO 98/00166, allowed U.S. application Ser. Nos. 08/675,556, and 08/675,566 both filed Jul. 3, 1996 (recombinant adenovirus), Grunhaus et al., 1992, “Adenovirus as cloning vectors,” Seminars in Virology (Vol. 3) p. 237-52, 1993, Ballay et al. EMBO Journal, vol. 4, p. 3861-65, Graham, Tibtech 8, 85-87, April, 1990, Prevec et al., J. Gen Virol. 70,42434, PCT WO 91/11525, Felgner et al. (1994), J. Biol. Chem. 269, 2550-2561, Science, 259: 1745-49, 1993 and McClements et al., “Immunization with DNA vaccines encoding glycoprotein D or glycoprotein B, alone or in combination, induces protective immunity in animal models of herpes simplex virus-2 disease”, PNAS USA 93: 11414-11420, October 1996, and U.S. Pat. Nos. 5,591,639, 5,589,466, and 5,580,859, as well as WO 90/11092, WO93/19183, WO94/21797, WO95/11307, WO95/20660, Tang et al., Nature and Furth et al. Analytical Biochemistry, relating to DNA expression vectors, inter alia. See also WO 98/33510; Ju et al., Diabetologia, 41: 736-739, 1998 (lentiviral expression system); Sanford et al., U.S. Pat. No. 4,945,050; Fischbach et al. (Intracel), WO 90/01543; Robinson et al., seminars in Immunology vol. 9, pp. 271-283 (1997), (DNA vector systems); Szoka et al., U.S. patent No. (method of inserting DNA into living cells); McCormick et al., U.S. Pat. No. 5,677,178 (use of cytopathic viruses); and U.S. Pat. No. 5,928,913 (vectors for gene delivery), as well as other documents cited herein, each of which is incorporated by reference herein.

[0213] A viral vector, for instance, selected from pig herpes viruses, such as Aujeszky's disease virus, porcine adenovirus, poxviruses, especially vaccinia virus, avipox virus, canarypox virus, and swinepox virus, as well as DNA vectors (DNA plasmids) are advantageously employed in the practice of the invention.

### Methods of Producing the 115 Proteins (1) According to the Present Invention

[0214] According to another aspect, the present invention provides methods of producing and/or recovering high amounts of recombinant H5 protein: i) by permitting infection of susceptible cells in culture with a recombinant viral vector containing H5 DNA coding sequences, wherein H5 protein is expressed by the recombinant viral vector, and ii) thereafter recovering the H5 protein from cell culture. High amounts of H5 protein means, but are not limited to, more than about 20 μg/mL cell culture, preferably more than about 25 μg/mL, even more preferred more than about 30 μg/mL, even more preferred more than about 40 μg/mL, even more preferred more than about 50 μg/mL, even more preferred more than about 60 μg/mL, even more preferred more than about 80 μg/mL, even more preferred more than about 100 μg/mL, even more preferred than about 150 μg/mL, most preferred more than about 190 μg/mL.

[0215] According to a preferred embodiment, the H5 protein (1) is recovered by harvesting the whole (i.e. intact) SF+ cells expressing the H5 protein.

[0216] Preferred cells are those susceptible for infection with an appropriate recombinant viral vector, containing a H5 DNA and expressing the H5 protein (1). Preferably the cells are insect cells, and more preferably, they include the insect cells sold under the trademark SF+ insect cells (Protein Sciences Corporation, Meriden, Conn.). Preferred cell cultures have a cell count between about 0.3-2.0×10⁶ cells/mL, more preferably from about 0.35-1.9×10⁶ cells/mL, still more preferably from about 0.4-1.8×10⁶ cells/mL, even more preferably from about 0.45-1.7×10⁶ cells/mL, and most preferably from about 0.5-1.5×10⁶ cells/mL.

[0217] Preferred viral vectors include baculovirus such as BaculoGold (BD Biosciences Pharmingen, San Diego, Calif.), in particular provided that the production cells are insect cells. Although the baculovirus expression system is preferred, it is understood by those of skill in the art that other expression systems will work for purposes of the present invention, namely the expression of H5 into the supernatant of a cell culture. Such other expression systems may require the use of a signal sequence in order to cause H5 expression into the media.

[0218] Appropriate growth media will also be determinable by those of skill in the art with a preferred growth media being serum-free insect cell media such as Excell 420 (JRH Biosciences, Inc., Lenexa, Kans.) and the like.

[0219] The recombinant viral vector containing the H5 DNA sequences has a preferred multiplicity of infection (MOI) of between about 0.03-1.5, more preferably from about 0.05-1.3, still more preferably from about 0.09-1.1, and most preferably from about 0.1-1.0, when used for the infection of the susceptible cells. Preferably the MOIs mentioned above relates to one mL of cell culture fluid. Preferably, the method described herein comprises the infection of 0.35-1.9×10⁶ cells/mL, still more preferably of about 0.4-1.8×10⁶ cells/mL, even more preferably of about 0.45-1.7×10⁶ cells/mL, and most preferably of about 0.5-1.5×10⁶ cells/mL with a recombinant viral vector containing a H5 DNA and expressing the H5 protein having a MOI (multiplicity of infection) of between about 0.03-1.5, more preferably from about 0.05-1.3, still more preferably from about 0.09-1.1, and most preferably from about 0.1-1.0.

[0220] The infected cells are then incubated over a period of up to ten days, more preferably from about two days to about ten days, still more preferably from about four days to about nine days, and most preferably from about five days to about eight days. Preferred incubation conditions include a temperature between about 22-32° C., more preferably from about 24-30° C., still more preferably from about 25-29° C., even more preferably from about 26-28° C., and most preferably about 27° C. Preferably, the SF+ cells are observed following inoculation for characteristic baculovirus-induced changes. Such observation may include monitoring cell density trends and the decrease in viability during the post-infection period. It was found that peak viral titer is observed 3-5 days after infection and peak H5 protein expression in the cells is obtained between days 5 and 8, and/or when cell viability decreases to less than 10%.

[0221] Thus, one aspect of the present invention provides a method of producing and/or recovering recombinant H5 protein, preferably in amounts described above, by i) permitting infection of a number of susceptible cells (see above) in culture with a recombinant viral vector with a MOI as defined above, ii) expressing H5 protein by the recombinant viral vector, and iii) thereafter recovering the H5 protein from the cells obtained between days 5 and 8 after infection and/or cell viability decreases to less than 10%. Preferably, the recombinant viral vector is a recombinant baculovirus containing H5 DNA coding sequences and the cells are SF+ cells. Additionally, it is preferred that the culture be periodically examined for macroscopic and microscopic evidence of contamination or for atypical changes in cell morphology during the post-infection period. Any culture exhibiting any contamination should be discarded.

[0222] For recovery of H5 protein (1) that will be used in an immunogenic or immunological composition such as a vaccine, the inclusion of an inactivation step is preferred in order to inactivate the viral vector.

[0223] An “immunogenic or immunological composition” refers to a composition of matter that comprises at least one antigen which elicits an immunological response in the host of a cellular and/or antibody-mediated immune response to the composition or vaccine of interest. Usually, an “immunological response” includes but is not limited to one or more of the following effects: the production or activation of antibodies, B cells, helper T cells, suppressor T cells, and/or cytotoxic T cells and/or gamma-delta T cells, directed specifically to an antigen or antigens included in the composition or vaccine of interest. Preferably, the host will display either a therapeutic or protective immunological response such that resistance to new infection will be enhanced and/or the clinical severity of the disease reduced. Such protection will be demonstrated by either a reduction or lack of symptoms normally displayed by an infected host, a quicker recovery time and/or a lowered viral titer in the infected host.

[0224] As used herein, “vaccine” refers to that term as it is used by those of skill in the art. More particularly, “vaccine” refers to an immunogenic composition that, when administered to an animal in need thereof, results in a reduction in the incidence of or severity of clinical signs of influenza infection up to an including the complete prevention of such clinical signs. Preferably, the reduction in incidence or severity is at least 10%, more preferably at least 20%, still more preferably at least 30%, even more preferably at least 40%, more preferably at least 50%, still more preferably at least 60%, even more preferably at least 70%, more preferably at least 80%, still more preferably at least 90%, even more preferably at least 95%, and most preferably 100% in comparison to an animal or group of animals that did not receive the compositions of the present invention but that were exposed to infectious levels of influenza virus that would normally result in influenza infection resulting in exhibiting clinical signs.

[0225] Thus, the present invention also relates to a method of producing and/or recovering recombinant H5 protein, preferably in amounts described above, by i) permitting infection of a number of susceptible cells (see above) in culture with a recombinant viral vector with a MOI as defined above, ii) expressing H5 protein by the recombinant viral vector, iii) recovering the H5 expressed in cells obtained between days 5 and 8 after infection and/or cell viability decreases to less than 10%, and iv) inactivating the recombinant viral vector.

[0226] Preferably, this inactivation is done either just before or just after the filtration step, with after the filtration step being the preferred time for inactivation. Any conventional inactivation method can be used for purposes of the present invention. Thus, inactivation can be performed by chemical and/or physical treatments. In preferred forms, the volume of harvest fluids is determined and the temperature is brought to between about 32-42° C., more preferably between about 34-40° C., and most preferably between about 35-39° C. Preferred inactivation methods include the addition of cyclized binary ethylenimine (BEI), preferably in a concentration of about 1 to about 20 mM, preferably of about 2 to about 10 mM, still more preferably of about 2 to about 8 mM, still more preferably of about 3 to about 7 mM, most preferably of about 5 mM. For example the inactivation includes the addition of a solution of 2-bromoethyleneamine hydrobromide, preferably of about 0.4M, which has been cyclized to 0.2M binary ethylenimine (BEI) in 0.3N NaOH, to the fluids to give a final concentration of about 5 mM BEI. Preferably, the fluids are then stirred continuously for 72-96 hours and the inactivated harvest fluids can be stored frozen at −40° C. or below or between about 1-7° C. After inactivation is completed a sodium thiosulfate solution, preferably at 1.0M is added to neutralize any residual BEI. Preferably, the sodium thiosulfate is added in equivalent amount as compared to the BEI added prior to for inactivation. For example, in the event BEI is added to a final concentration of 5 mM, a 1.0M sodium thiosulfate solution is added to give a final minimum concentration of 5 mM to neutralize any residual BEI.

[0227] Thus, one further aspect of the present invention relates to a method of producing recombinant H5 protein, preferably in amounts described above, by i) permitting infection of a number of susceptible cells (see above) in culture with a recombinant viral vector with a MOI as defined above, ii) expressing H5 protein by the recombinant viral vector, iii) recovering the H5 expressed in the cells obtained between days 5 and 8 after infection and/or cell viability decreases to less than 10%, and iv) inactivating the recombinant viral vector. Preferably, the recombinant viral vector is a baculovirus containing H5 DNA coding sequences and the cells are SF+ cells. Preferred inactivation steps are those described above. Preferably, inactivation is performed between about 35-39° C. and in the presence of 2 to 8 mM BEI, still more preferred in the presence of about 5 mM BEI.

[0228] According to one further aspect of the present invention, the method described above also includes a neutralization step after step iv). This step v) comprises adding of an equivalent amount of an agent that neutralizes the inactivation agent within the solution. Preferably, if the inactivation agent is BEI, addition of sodium thiosulfate to an equivalent amount is preferred. Thus, according to a further aspect, step v) comprises adding of a sodium thiosulfate solution to a final concentration of about 1 to about 20 mM, preferably of about 2 to about 10 mM, still more preferably of about 2 to about 8 mM, still more preferably of about 3 to about 7 mM most preferably of about 5 mM, when the inactivation agent is BEI.

[0229] In preferred forms and especially in forms that will use the recombinant H5 protein in an immunogenic composition such as a vaccine, each lot of harvested H5 protein will be tested for inactivation by passage in the anchorage dependent, baculovirus susceptible insect cells, such as Sf9 cells. In a preferred form of this testing, 150 cm² of appropriate cell culture monolayer is inoculated with 1.0 mL of inactivated H5 fluids and maintained at 25-29° C. for 14 days with at least two passages. At the end of the maintenance period, the cell monolayers are examined for cytopathogenic effect (CPE) typical of H5 baculovirus. Preferably, positive virus controls are also used. Such controls can consist of one culture of Sf9 cells inoculated with a non-inactivated reference H5 baculovirus and one flask of Sf9 cells that remain non-inoculated. After incubation and passage, the absence of virus-infected cells in the BEI treated viral fluids would constitute a satisfactory inactivation test. The control cells inoculated with the reference virus should exhibit CPE typical of H5 baculovirus and the non-inoculated flask should not exhibit any evidence of H5 baculovirus CPE. Alternatively, at the end of the maintenance period, the supernatant samples could be collected and inoculated onto a Sf9 96 well plate, which has been loaded with Sf9 cells, and then maintained at 25-29° C. for 5-6 days. The plate is then fixed and stained with anti-H5 antibody conjugated to FITC or any labeled antibody directed to baculovirus specific proteins (i.e. gp64). The absence of CPE, H5 expression, or expression of baculovirus specific proteins (i.e. gp64) in the BEI treated viral fluids constitutes a satisfactory inactivation test. The control cells inoculated with the reference virus should exhibit CPE and IFA activity and the non-inoculated flask should not exhibit any evidence of H5 baculovirus CPE and contain no IFA activity.

[0230] Thus a further aspect described herein, relates to an inactivation test for determining the effectiveness of the inactivation of the recombination viral vector expressing H5 protein (1), comprises the steps: i) contacting at least a portion of the culture fluid containing the recombinant viral vector with an inactivating agent, preferably as described above, ii) adding a neutralization agent to neutralize the inactivation agent, preferably as described above, and iii) determining the residual infectivity by the assays as described above.

[0231] After inactivation, the relative amount of recombinant H5 protein in a sample can be determined in a number of ways. Preferred methods of quantitation include SDS-PAGE densitometry, ELISA, and animal vaccination studies that correlate known quantities of vaccine with clinical outcomes (serology, etc.). When SDS-PAGE is utilized for quantitation, the sample material containing an unknown amount of recombinant H5 protein is run on a gel, together with samples that contain different known amounts of recombinant H5 protein. A standard curve can then be produced based on the known samples and the amount of recombinant H5 in the unknown sample can be determined by comparison with this standard curve. Because ELISAs are generally recognized as the industry standard for antigen quantitation, they are preferred for quantitation.

### Vaccines Comprising 115 Proteins (1) or Nucleic Acid Molecules or Vectors Coding for Those

[0232] The invention further provides a combination of (a) the H5 protein (1) described herein and (b) an inactivated Newcastle disease virus for use in a method of treating or preventing infections with H5N1 virus of a different clade, in particular for use in any method of treating or preventing infections with H5N1 virus of a different clade as described herein.

[0233] Said combination is also termed “the combination described herein” hereinafter.

[0234] According to the invention it is understood that the combination described herein is preferably included in a multivalent combination vaccine or the combination described herein is in particular directed to a combined vaccination, more particular to an administration of the H5 protein (1) described herein and of the inactivated Newcastle disease virus within a maximum of 24 hours to an animal, in particular poultry, or human being in need thereof.

[0235] Preferably, the inactivated Newcastle disease virus is an inactivated whole Newcastle disease virion.

[0236] In another preferred embodiment, the inactivated Newcastle disease virus is an inactivated Newcastle disease virus obtained by inactivation of a Newcastle disease virus comprising a RNA polynucleotide having at least 70%, preferably at least 80%, more preferably at least 90%, still more preferably at least 95% or in particular 100% sequence identity with a RNA copy of the polynucleotide set forth in SEQ ID NO: 139 (cDNA sequence of LaSota strain virus), which has been inactivated.

[0237] In particular, the inactivated Newcastle disease virus is an inactivated Newcastle disease LaSota strain virus.

[0238] In one preferred embodiment the inactivated Newcastle Disease Virus is a Newcastle Disease Virus which has been inactivated with a reagent selected from the group consisting of Formaldehyde, binary ethyleneimine (BEI), Beta-Propio-Lactone (BPL), and combinations thereof.

[0239] The amount of inactivated Newcastle disease virus in the combination described herein is preferably between 10² and 10¹⁰ equivalents of egg infectious doses (EID50), preferably between 10⁶ and 10⁹ EID50, in particular preferably between 10⁷ and 10⁹ EID50. The amount of the H5 protein (1) in the combination described herein is preferably the same as mentioned hereinafter.

[0240] The amount of the H5 protein (1) according to the invention is preferably between 10 and 1000 Hemagglutination units (HAU's) per dose, more preferably between 50 and 950 HAU's per dose, even more preferably between 100 and 900 HAU's per dose, even more preferably between 200 and 800 HAU's per dose, even more preferably between 300 and 700 HAU's per dose, still more preferably between 300 and 500 HAU's per dose.

[0241] According to a further aspect, the present invention relates to vaccines or pharmaceutical compositions in general, that comprises,
[0242] i. one or more of the H5 proteins (1) as described herein or the combination described herein;
[0243] ii. one or more of the nucleic acid molecules as described herein, coding for any such H5 proteins (1); and/or
[0244] iii. one or more of the vectors as described herein, including any such nucleic acid molecules and coding for any such H5 proteins (1) as described herein; and
[0245] iv. a pharmaceutical acceptable carrier and/or excipient.

[0246] The term “pharmaceutical composition” “Pharmaceutical/vaccine composition” as described herein, includes but is not limited to, vaccines for the reduction or prevention of an infection or to a composition of matter for the treatment and lessening of an infection.

[0247] The preparation of nucleic acid based vaccines, preferably cDNA vaccines, coding for influenza hemagglutinin are described for example in Deck et al, Vaccine 1997; 15(1):71-78; Ulmer et al., Science 1993; 259:1745-1749; Ulmer et al., Vaccine 1994; 12(16):1541-1544. Any of those methods can be used for the production of nucleic acid based vaccines, preferably cDNA vaccines, coding for an influenza H5 protein as described herein.

[0248] Moreover, a vaccine, which comprises H5 protein (1) or parts thereof as described herein, can be produced by conventional approaches, e.g. by recombinant expression techniques or by biochemical purification and separation techniques. Recombinant expression techniques, including the expression in insect cells are well known in the art, and described for example in Sambrook et al., Molecular Cloning: A Laboratory Manual, Second Edition (1989) Cold Spring Harbor Laboratory Press, Cold Spring Harbor, N.Y.; DNA Cloning: A Practical Approach, Volumes I and II (D. N. Glover ed. 1985); Oligonucleotide Synthesis (M. J. Gait ed. 1984); Nucleic Acid Hybridization [B. D. Hames & S. J. Higgins eds. (1985)]; Transcription And Translation [B. D. Hames & S. J. Higgins, eds. (1984)]; Animal Cell Culture [R. I. Freshney, ed. (1986)]; Immobilized Cells And Enzymes [IRL Press, (1986)]; B. Perbal, A Practical Guide To Molecular Cloning (1984); F. M. Ausubel et al. (eds.), Current Protocols in Molecular Biology, John Wiley & Sons, Inc. 1994). Further examples of well established recombinant expression systems are bacterial expression systems such as E. coli or B. subtilis, yeast-based expression systems such as S. cerevisiae or S. pombe, or mammalian cell expression systems such as the BHK-, CHO- and/or NS0-based expression systems. Such systems are well known in the art and generally available, e.g. commercially through Clontech Laboratories, Inc. 4030 Fabian Way, Palo Alto, Calif. 94303-4607, USA. Further expression strategies are for example described in Liischow et al., Vaccine no. 19 (2001), pp. 4249-4259, or Veit et al., PNAS vol. 103 (2006), pp. 8197-8202. Furthermore, recombinant adeno-associated virus systems are well established and for example described in U.S. Pat. No. 5,436,146 or WO200203872 with further references. Moreover, vaccinia (pox) virus based expression systems, for example as described in U.S. Pat. No. 6,265,183 with further references, are also well established and suitable to produce recombinant antigen(s), antigenic composition(s) as used according to the invention. Further suitable expression systems make use of recombinant popova viruses, such as SV40, fowl pox virus, pseudorabies viruses and retroviruses.

[0249] The relevant pharmaceutical/vaccine compositions as described herein, can also comprise inactivated virus which comprises H5 protein (1) as described herein, an apathogenic version of a live virus comprising H5 protein (1) as described herein, preparation and/or fragments of a virus, wherein said preparation and/or fragment comprise the H5 protein (1) as described herein.

[0250] The skilled person knows additional components which may be comprised in said compositions/vaccines together with antigen (see for example, Remington's Pharmaceutical Sciences. (1990). 18th ed. Mack Publ., Easton). The expert may use known injectable, physiologically acceptable sterile solutions. For preparing a ready-to-use solution, aqueous isotonic solutions, such as e.g. saline or corresponding plasma protein solutions, are readily available. The pharmaceutical composition/vaccine may be present as lyophylisates or dry preparations, which can be reconstituted with a known injectable solution directly before use under sterile conditions, e.g. as a kit of parts.

[0251] In addition the pharmaceutical/vaccine compositions of the present invention can include one or more veterinary-acceptable carriers. As used herein, “a veterinary-acceptable carrier” includes but is not limited to any and all solvents, dispersion media, coatings, adjuvants, stabilizing agents, diluents, preservatives, antibacterial and antifungal agents, isotonic agents, adsorption delaying agents, and the like.

[0252] Diluents can include water, saline, dextrose, ethanol, glycerol, and the like. Isotonic agents can include sodium chloride, dextrose, mannitol, sorbitol, and lactose, among others. Stabilizers include albumin and alkali salts of ethylendiamintetracetic acid, among others.

[0253] A preservative as used herein refers to an anti-microbiological active agent, such as for example Gentamycin, Merthiolate, and the like. In particular adding of a preservative is most preferred for the preparation of a multi-dose composition. Those anti-microbiological active agents are added in concentrations effective to prevent the composition of interest for any microbiological contamination or for inhibition of any microbiological growth within the composition of interest.

[0254] “Adjuvants” as used herein, can include aluminum hydroxide and aluminum phosphate, saponins e.g., Quil A, QS-21 (Cambridge Biotech Inc., Cambridge Mass.), GPI-0100 (Galenica Pharmaceuticals, Inc., Birmingham, Ala.), water-in-oil emulsion, oil-in-water emulsion, water-in-oil-in-water emulsion.

[0255] The emulsion can be based in particular on light liquid paraffin oil (European Pharmacopoeia type); isoprenoid oil such as squalane or squalene; oil resulting from the oligomerization of alkenes, in particular of isobutene or decene; esters of acids or of alcohols containing a linear alkyl group, more particularly plant oils, ethyl oleate, propylene glycol di-(caprylate/caprate), glyceryl tri-(caprylate/caprate) or propylene glycol dioleate; esters of branched fatty acids or alcohols, in particular isostearic acid esters. The oil is used in combination with emulsifiers to form the emulsion. The emulsifiers are preferably nonionic surfactants, in particular esters of sorbitan, of mannide (e.g. anhydromannitol oleate), of glycol, of polyglycerol, of propylene glycol and of oleic, isostearic, ricinoleic or hydroxystearic acid, which are optionally ethoxylated, and polyoxypropylene-polyoxyethylene copolymer blocks, in particular the Pluronic products, especially L121. See Hunter et al., The Theory and Practical Application of Adjuvants (Ed. Stewart-Tull, D. E. S.). John Wiley and Sons, NY, pp 51-94 (1995) and Todd et al., Vaccine 15:564-570 (1997). Examples for suitable oil-in water emulsions are Emulsigen-based adjuvants, such as EMULSIGEN®, EMULSIGEN-D®, EMULSIGEN-P®, EMULSIGEN-75® (MVP Laboratories, Inc. Omaha, Nebr., USA). It has been surprisingly found, that pharmaceutical/vaccine compositions that comprise H5 protein, preferably recombinant H5 protein as described herein, have been effectively adjuvanted with oil-in water emulsions, preferably with such Emulsigen-based adjuvants, more preferably with EMULSIGEN® and EMULSIGEN-D®.

[0256] Moreover, it is possible to use the SPT emulsion described on page 147 of “Vaccine Design, The Subunit and Adjuvant Approach” edited by M. Powell and M. Newman, Plenum Press, 1995, and the emulsion MF59 described on page 183 of this same book.

[0257] A further instance of an adjuvant is a compound chosen from the polymers of acrylic or methacrylic acid and the copolymers of maleic anhydride and alkenyl derivative. Advantageous adjuvant compounds are the polymers of acrylic or methacrylic acid which are cross-linked, especially with polyalkenyl ethers of sugars orpolyalcohols. These compounds are known by the term carbomer (Phameuropa Vol. 8, No. 2, June 1996). Persons skilled in the art can also refer to U.S. Pat. No. 2,909,462 which describes such acrylic polymers cross-linked with a polyhydroxylated compound having at least 3 hydroxyl groups, preferably not more than 8, the hydrogen atoms of at least three hydroxyls being replaced by unsaturated aliphatic radicals having at least 2 carbon atoms. The preferred radicals are those containing from 2 to 4 carbon atoms, e.g. vinyls, allyls and other ethylenically unsaturated groups. The unsaturated radicals may themselves contain other substituents, such as methyl. The products sold under the name Carbopol; (BF Goodrich, Ohio, USA) are particularly appropriate. They are cross-linked with allyl sucrose or with allyl pentaerythritol. Among then, there may be mentioned Carbopol 974P, 934P and 971P. Most preferred is the use of Carbopol 971P. Among the copolymers of maleic anhydride and alkenyl derivative, the copolymers EMA (Monsanto) which are copolymers of maleic anhydride and ethylene. The dissolution of these polymers in water leads to an acid solution that will be neutralized, preferably to physiological pH, in order to give the adjuvant solution into which the immunogenic, immunological or vaccine composition itself will be incorporated.

[0258] Further suitable adjuvants include, but are not limited to, the RIBI adjuvant system (Ribi Inc.), Block co-polymer (CytRx, Atlanta Ga.), SAF-M (Chiron, Emeryville Calif.), monophosphoryl lipid A, Avridine lipid-amine adjuvant, heat-labile enterotoxin from E. coli (recombinant or otherwise), cholera toxin, or muramyl dipeptide among many others.

[0259] Preferably, the adjuvant is added in an amount of about 100 μg to about 10 mg per dose. Even more preferred the adjuvant is added in an amount of about 100 μg to about 10 mg per dose. Even more preferred the adjuvant is added in an amount of about 500 μg to about 5 mg per dose. Even more preferred the adjuvant is added in an amount of about 750 μg to about 2.5 mg per dose. Most preferred the adjuvant is added in an amount of about 1 mg per dose.

[0260] The pharmaceutical/vaccine compositions can further include one or more other immunomodulatory agents such as, e.g., interleukins, interferons, or other cytokines. The pharmaceutical/vaccine compositions can also include Gentamicin and Merthiolate. While the amounts and concentrations of adjuvants and additives useful in the context of the present invention can readily be determined by the skilled artisan, the present invention contemplates compositions comprising from about 50 μg to about 2000 μg of adjuvant and preferably about 250 ug/1 ml dose of the vaccine composition. In another preferred embodiment, the present invention contemplates vaccine compositions comprising from about 1 ug/ml to about 60 μg/ml of antibiotics, and more preferably less than about 30 μg/ml of antibiotics.

[0261] Thus, according to a further embodiment, the present invention also relates to a pharmaceutical/vaccine composition comprising
[0262] i. a therapeutically effective amount of any one of the H5 proteins of influenza virus as described herein, wherein the H5 protein having the amino acid 223N and the modification 328K+, wherein numbering of the amino acid positions of the H5 protein refers to the amino acid position as exemplarily given in SEQ ID NO:2 and wherein the modification 328K+ means that at amino acid position 328 of H5 protein a second Lysine (K+) is inserted; and
[0263] ii. pharmaceutically acceptable adjuvants as described above.
   Preferably, the adjuvant is selected from the group consisting of:
[0264] a) EMULSIGEN®, an oil-in-water emulsion (o/w);
[0265] b) EMULSIGEN-D®, an oil-in-water (o/w) with dimethyldioctadecylammonum bromide (DDA);
[0266] c) a Polygen, a copolymer
[0267] d) EMULSIGEN-P®, an oil-in-water (o/w) with a proprietary immunostimulant
[0268] e) Carbigen is a cross-linked polymer
[0269] f) EMULSIGEN-75®, a double adjuvants comprise of an oil-in-water (o/w) with a cross-linked polymer
[0270] g) ISA 70 is a water-in-oil (w/o)

[0271] Most preferably, the adjuvants is an oil-in-water emulsion such as an emulsigen-based adjuvant selected from the group consisting of EMULSIGEN®, EMULSIGEN-D®, EMULSIGEN-P®, EMULSIGEN-75®, EMULSIGEN® and EMULSIGEN-P®. Most preferably EMULSIGEN® and EMULSIGEN-P® are used in the formulation of the current invention.

[0272] According to a further aspect, the pharmaceutical/vaccine compositions as provided herewith comprise one or more antigen. Preferably, that further antigen is an antigen of a poultry or mammalian pathogen. According to a further embodiments, that additional antigen is an further influenza antigen such as hemagglutinin H5, H7, H9, or any other hemagglutinin of influenza virus, wherein the H5 is preferably a H5 protein of a H5N1 virus of a clade different than clade 1, in particular of a H5N1 virus of North African origin, such as the H5 protein (2) described herein. The additional antigen(s) can be added in a purified form, as part of an antigenic preparation, in the form of a killed microorganism or in the form of a modified live microorganism.

[0273] The term “antigen”, as used herein means, but is not limited to, peptides, polypeptides, glycopeptides, or polysaccharides which are capable of specifically interacting with an antigen recognition molecule of the immune system, such as an immunoglobulin (antibody) or T cell antigen receptor in order to elicit, activate or stimulate an immune response directed to said antigen in a host to which said antigen is administered. The term “antigen” also refers to nucleic acid molecules, preferably DNA- or RNA-molecules, each of which codes for and express a peptide, polypeptide, or glycopeptide that is capable of specifically interacting with an antigen recognition molecule of the immune system, such as an immunoglobulin (antibody) or T cell antigen receptor in order to elicit, activate or stimulate an immune response against the antigen that is coded by the nucleic acid molecule. The antigen used for the preparation of the pharmaceutical composition which is used according to the invention is a microorganism or an antigenic part and/or preparation of said microorganism. In this connection, the term “immunization”, as used herein, means but is not limited to, any cause or enhancement of an immune response. The term “immune response” is already described supra.

[0274] Administration strategies for influenza vaccines are well known in the art. Mucosal vaccination strategies for inactivated and attenuated virus vaccines are contemplated. While the mucosa can be targeted by local delivery of a vaccine, various strategies have been employed to deliver immunogenic proteins to the mucosa.

[0275] In a specific embodiment, the vaccine can be administered in an admixture with, or as a conjugate or chimeric fusion protein with, cholera toxin, such as cholera toxin B or a cholera toxin A/B chimera (Hajishengallis, J. Immunol., 154:4322-32, 1995; Jobling and Holmes, Infect Immun., 60:4915-24, 1992). Mucosal vaccines based on use of the cholera toxin B subunit have been described (Lebens and Holmgren, Dev Biol Stand 82:215-27, 1994). In another embodiment, an admixture with heat labile enterotoxin (LT) can be prepared for mucosal vaccination.

[0276] Other mucosal immunization strategies include encapsulating the virus in microcapsules (U.S. Pat. No. 5,075,109, U.S. Pat. No. 5,820,883, and U.S. Pat. No. 5,853,763) and using an immunopotentiating membranous carrier (WO 98/0558) Immunogenicity of orally administered immunogens can be enhanced by using red blood cells (rbc) or rbc ghosts (U.S. Pat. No. 5,643,577), or by using blue tongue antigen (U.S. Pat. No. 5,690,938).

[0277] According to another aspect, the present invention relates to a method for preparing a pharmaceutical/vaccine composition as described above, preferably a method for producing a vaccine which comprises a recombinant, baculovirus expressed H5 protein as described supra. Generally, this method includes the steps of transfecting a construct into a virus, wherein the construct comprises i) recombinant H5 cDNA as described herein, ii) infecting cells in growth media with the transfected virus, iii) causing the virus to express the recombinant H5 protein as described herein iv) recovering the expressed H5 protein from the culture v) and preparing the composition by blending the expressed H5 protein with a suitable adjuvant and/or other pharmaceutically acceptable carrier.

[0278] Preferred adjuvants are those described above. Thus according to a further aspect, the method for preparing an antigenic composition, such as for example a vaccine, for invoking an immune response against influenza infections comprises i) preparing and recovering H5 protein, and ii) admixing this with a suitable adjuvants.

[0279] In addition, the vaccine composition of the present invention can also include diluents, isotonic agents, stabilizers, and/or preservatives. Diluents can include water, saline, dextrose, ethanol, glycerol, and the like. Isotonic agents can include as non-limiting examples inorganic or organic salts, e.g., sodium chloride, dextrose, mannitol, sorbitol, and lactose, saccharides, trehalose, mannitol, saccharose among others. Stabilizers include albumin and alkali salts of ethylendiamintetracetic acid, among others. Suitable adjuvants are those described above.

### Medicinal Use of any of Such 115 Proteins (1), Nucleic Acid Molecules, Vectors, Vaccines, and Combinations Described Herein

[0280] The H5 proteins (1) as provided herewith, the nucleic acid molecules coding for any such H5 proteins (1), the vectors comprising any such nucleic acid molecules coding for any such H5 proteins (1) as described herein, and any pharmaceutical/vaccine composition comprising any of such H5 protein (1), nucleic acid molecule or vector or the combination described herein can be used as a medicine, preferably for the treatment and prophylaxis of infections, caused by influenza virus, most preferably by influenza A virus. The H5 proteins (1) as provided herewith, the nucleic acid molecules encoding for any such H5 proteins, the vectors comprising any such nucleic acid molecules encoding for any such H5 proteins (1) as described herein, and any pharmaceutical/vaccine composition comprising any of such H5 protein (1), nucleic acid molecule or vector, as described herein, or the combination described herein can be used for the treatment or prophylaxis of human beings as well as in veterinary medicine. When used in veterinary medicine, the treatment of poultry, preferably bird, chicken, duck, turkey and the like as well as mammals, preferably pigs, cattle, horses, seals, camels, dogs, cats, hamsters, mice and the like, is preferred.

[0281] In terms of the present invention, “prophylaxis” refers to the reduction in the incidence of or severity of clinical signs of influenza infection up to an including the complete prevention of such clinical signs. Preferably, the reduction in incidence or severity is at least 10%, more preferably at least 20%, still more preferably at least 30%, even more preferably at least 40%, more preferably at least 50%, still more preferably at least 60%, even more preferably at least 70%, more preferably at least 80%, still more preferably at least 90%, even more preferably at least 95%, and most preferably 100% in comparison to an animal or group of animals that did not receive the compositions of the present invention but that were exposed to infectious levels of influenza virus that would normally result in influenza infection resulting in exhibiting clinical signs.

[0282] Thus, according to another aspect the present invention relates to the use of H5 proteins (1) as provided herewith, the nucleic acid molecules encoding for any such H5 proteins (1), the vectors comprising any such nucleic acid molecules encoding for any such H5 proteins (1) as described herein and any pharmaceutical/vaccine compositions comprising any of such H5 protein (1), nucleic acid molecule or vector as described herein or the combination described herein, can be used as a medicine, preferably as a medicine for human beings and/or as veterinary medicine, preferably for poultry, in particular for chicken.

[0283] Moreover, H5 proteins (1) as provided herewith, the nucleic acid molecules coding for any such H5 proteins (1), the vectors comprising any such nucleic acid molecules coding for any such H5 protein (1), as described herein, or the combination described herein can be used for the preparation of a pharmaceutical composition, as described herein, preferably of a single-shot vaccine or a one dose vaccine, for the prophylaxis or treatment of infections caused by H5N1 virus of a clade other than clade 1, wherein said H5N1 virus of a clade other than clade 1 is preferably the H5N1 virus of a different clade as described herein. As mentioned above, those pharmaceutical compositions/vaccine compositions can be used for the treatment and/or prophylaxis of human beings as well as for the treatment and/or prophylaxis of animals, such as poultry, preferably bird, chicken, duck, turkey and the like as well as mammals, preferably pigs, cattle, horses, seals, camels, dogs, cats, hamsters, mice and the like.

[0284] According to a further aspect, the present invention also relates to a method for the treatment or prophylaxis of influenza virus infections caused by H5N1 virus of a clade other than clade 1, wherein said H5N1 virus of a clade other than clade 1 is preferably the H5N1 virus of a different clade as described herein, wherein the method comprising administration of a therapeutically effective amount of the H5 protein (1) as described herein or of the combination described herein, to a subject in need of such a treatment. Moreover, the present invention also relates to a method for the treatment or prophylaxis of influenza virus infections caused by H5N1 virus of a clade other than clade 1, wherein said H5N1 virus of a clade other than clade 1 is preferably the H5N1 virus of a different clade as described herein, wherein the method comprising administration of a therapeutically effective amount of any H5 nucleic acid molecule or vector as described herein, that codes for any H5 protein (1) as described herein, to a subject in need of such a treatment. Furthermore, the present invention also relates to a method for the treatment or prophylaxis of influenza virus infections caused by H5N1 virus of a clade other than clade 1, wherein said H5N1 virus of a clade other than clade 1 is preferably the H5N1 virus of a different clade described herein, wherein the method comprising administration of a therapeutically effective amount of the vaccine comprising any such H5 protein (1), nucleic acid molecule or vector, as described herein, to a subject in need of such a treatment. The subject in need thereof can be a human being as well as an animal, preferably poultry, even more preferably bird, chicken, duck, turkey or a mammal, preferably pig, cattle, horse, seal, camel, dog, cat, hamster, mouse and the like.

[0285] Preferably, the administration, as described herein, is a single-shot administration or a one dose administration.

[0286] Preferably, when chicken are vaccinated, the H5 protein as described herein can be used for vaccination at day 1 of age or later, e.g. at day 10, or at day 1 to 10, or at day 10 or later.

[0287] Preferably the influenza infection that can be treated by the administration of any H5 protein (1), the nucleic acid molecule or vector encoding for any such H5 protein, or any pharmaceutical/vaccine compositions as described herein, is caused by H5N1 virus of a clade other than clade 1, wherein said H5N1 virus of a clade other than clade 1 is preferably the H5N1 virus of a different clade as described herein and, as the case may be, also in combination with another avian, swine or human influenza virus or any combination or hybrid thereof.

[0288] A further advantage of the present invention is that it benefits a “DIVA” (Differentiation of Infected and Vaccinated Animals) concept with specific Elisa Kits for differentiating between vaccinated human beings or animals and human beings or animals infected with H5N1 virus.

[0289] According to another aspect, the present invention relates to a kit of parts, that comprises i) any of such H5 protein (1) as described herein, the nucleic acid molecule or vector encoding for any such H5 protein, or any pharmaceutical/vaccine composition comprising any of such H5 protein, nucleic acid molecule or vector as described herein, and ii) a package leaflet indicating the use of such H5 protein, nucleic acid molecule, vector or vaccine for the treatment or prophylaxis of infections caused by H5N1 virus of a clade other than clade 1, wherein said H5N1 virus of a clade other than clade 1 is preferably the H5N1 virus of a different clade as described herein. When chicken are vaccinated, the H5 protein (1) as described herein can be used for vaccination at day 1 on age or later.

[0290] It is thus understood that the kit of parts as mentioned herein is for the use, or is used, respectively, for the treatment or prophylaxis of infections caused by H5N1 virus of a clade other than clade 1, wherein said H5N1 virus of a clade other than clade 1 is preferably the H5N1 virus of a different clade as described herein.

[0291] According to a further embodiment, that kit in parts comprises at least one further antigen of poultry or mammalian pathogen and the information indication the medicinal, human or veterinary use of that additional antigen, in particular the further antigen as mentioned above.

[0292] The invention further provides a method for reducing viral shedding in a subject, comprising administering the H5 protein (1) described herein or the combination as described herein to a subject infected with or at risk of a viral infection with H5N1 virus of a clade other than clade 1, wherein said H5N1 virus of a clade other than clade 1 is preferably the H5N1 virus of a different clade as described herein.

[0293] The invention also relates to the H5 protein (1) described herein or the combination as described herein for use in a method for reducing viral shedding in a subject, wherein said H5 protein (1) or said combination is to be administered to a subject infected with or at risk of a viral infection with H5N1 virus of a clade other than clade 1, and wherein said H5N1 virus of a clade other than clade 1 is preferably the H5N1 virus of a different clade as described herein.

[0294] Also, the invention provides the use of the H5 protein (1) described herein or of the combination as described herein for the preparation of a medicament for reducing viral shedding in a subject infected with or at risk of a viral infection with H5N1 virus of a clade other than clade 1, wherein said H5N1 virus of a clade other than clade 1 is preferably the H5N1 virus of a different clade as described herein.

[0295] Preferably, the H5 protein (1) according to the invention, the combination described herein, the vaccine as described herein or the kit mentioned herein is for use as a single-shot vaccine or in a one-dose vaccination.

### EXAMPLES

[0296] The following examples set forth preferred materials and procedures in accordance with the present invention. It is to be understood, however, that these examples are provided by way of illustration only, and nothing therein should be deemed a limitation upon the overall scope of the invention.

### Example 1

### Construction of a Recombinant Baculoviruses Coding for and Expressing HA 115 Antigens

[0297] The recombinant baculovirus containing the H5 HA antigen was generated as follows: the coding sequences of the H5 HA (SEQ ID NO:3) was chemically synthesized and subcloned into the transfer vector pVL1392 (BD Biosciences Pharmingen, San Diego, Calif.). The H5 HA MutK+(SEQ ID NO:5) was generated by using oligonucleotide primers and the QUIKCHANGE® Site-Directed Mutagenesis Kit (Stratagene, La Jolla, Calif.) and subcloned into the transfer vector pVL1392 (BD Biosciences Pharmingen, San Diego, Calif.). The pVL1392 plasmids containing the genes coding for H5 HA antigen (SEQ ID NO:3) and H5 HA MutK+(SEQ ID NO:5) were then co-transfected with DIAMONDBAC® (Sigma) baculovirus DNA into Sf9 insect cells (BD Biosciences Pharmingen) to generate the recombinant baculovirus containing the genes H5 HA coding for SEQ ID NO:3 and H5 HA mutK+ coding for SEQ ID NO:5. The recombinant baculoviruses containing the genes coding for H5 HA (SEQ ID NO:3) and H5 HA MutK+(SEQ ID NO:5) were plaque-purified and Master Seed Viruses (MSVs) were propagated on the SF+ cell line, aliquoted, and stored at −70° C. Insect cells infected with H5 HA baculoviruses as described above to generate MSV or Working Seed Viruses express H5 HA antigen (SEQ ID NO:3) and H5 HA MutK+ (SEQ ID NO:5) antigen as detected by polyclonal serum or monoclonal antibodies in an indirect fluorescent antibody assay or Western blot.

[0298] After being seeded with the appropriate amounts of recombinant baculoviruses (H5 HA and H5 HA MutK+, respectively), spinner flasks containing SF+ cells (Protein Sciences, Inc., Meriden, Conn.) were then incubated at 27±2° C. for 7 days and with stirring 100 rpm during that time. The flasks used ventilated caps to allow for air flow. The crude whole cell culture containing baculovirus infected SF+ cells and the cell culture supernatants of each culture were harvested.

### Example 2

### Preparation Of Pharmaceutical Compositions (Vaccines) Comprising HA H5 Antigens

[0299] The crude whole cell H5 HA protein and H5 HA Mutk+ protein expressed in insect cells by baculovirus-based expression system were harvested. Baculoviruses were inactivated in the presence of 5 mM cyclized binary ethylenimine (BEI) (final concentration) between about 32 and 39° C. for 72 to 96 hours. After inactivation is completed, a 0.3 M sodium thiosulfate solution was added to a final concentration of 5 mM to neutralize any residual BEI. After neutralization, various adjuvants were added and the following vaccine/pharmaceutical compositions were generated.

### Vaccines

| | |
|---|---|
| Generic | 501 |
| product | |
| name | |
| Antigen | Crude whole-cell H5 HA protein expressed in insect cells by |
| | a baculovirus-based expression system. |
| Formula- | An experimental vaccine comprised of cultured insect cells |
| tion | and supernatant expressing recombinant H5 HA. The vaccine |
| | was adjuvanted with Emulsigen. |
| Generic | 502 |
| product | |
| name | |
| Antigen | Crude whole-cell H5 HA protein expressed in insect cells by |
| | a baculovirus-based expression system. |
| Formula- | An experimental vaccine comprised of cultured insect cells |
| tion | and supernatant expressing recombinant H5 HA. The vaccine |
| | was adjuvanted with Emulsigen-D. |
| Generic | 503 |
| product | |
| name | |
| Antigen | Crude whole-cell H5 HA protein expressed in insect cells by |
| | a baculovirus-based expression system. |
| Formula- | An experimental vaccine comprised of cultured insect cells |
| tion | and supernatant expressing recombinant H5 HA. The vaccine |
| | was adjuvanted with Polygen. |
| Generic | 504 |
| product | |
| name | |
| Antigen | Crude whole-cell H5 HA protein expressed in insect cells by |
| | a baculovirus-based expression system. |
| Formula- | An experimental vaccine comprised of cultured insect cells |
| tion | and supernatant expressing recombinant H5 HA. The vaccine |
| | was adjuvanted with Emulsigen-P. |
| Generic | 505 |
| product | |
| name | |
| Antigen | Crude whole-cell H5 HA protein expressed in insect cells by |
| | a baculovirus-based expression system. |
| Formula- | An experimental vaccine comprised of cultured insect cells |
| tion | and supernatant expressing recombinant H5 HA. The vaccine |
| | was adjuvanted with Carbigen. |
| Generic | 506 |
| product | |
| name | |
| Antigen | Crude whole-cell H5 HA protein expressed in insect cells by |
| | a baculovirus-based expression system. |
| Formula- | An experimental vaccine comprised of cultured insect cells |
| tion | and supernatant expressing recombinant H5 HA. The vaccine |
| | was adjuvanted with Emulsigen-75. |
| Generic | 507 |
| product | |
| name | |
| Antigen | Crude whole-cell H5 HA protein expressed in insect cells by |
| | a baculovirus-based expression system. |
| Formula- | An experimental vaccine comprised of cultured insect cells |
| tion | and supernatant expressing recombinant H5 HA. The vaccine |
| | was adjuvanted with ISA 70. |
| Generic | 508 |
| product | |
| name | |
| Antigen | Crude whole-cell H5 HA mutK+ protein expressed in insect |
| | cells by a baculovirus-based expression system. |
| Formula- | An experimental vaccine comprised of cultured insect cells |
| tion | and supernatant expressing recombinant H5 HA. The vaccine |
| | was adjuvanted with Emulsigen. |
| Generic | 509 |
| product | |
| name | |
| Antigen | Crude whole-cell H5 HA mutK+ protein expressed in insect |
| | cells by a baculovirus-based expression system. |
| Formula- | An experimental vaccine comprised of cultured insect cells |
| tion | and supernatant expressing recombinant H5 HA. The vaccine |
| | was adjuvanted with Emulsigen-D. |
| Generic | 510 |
| product | |
| name | |
| Antigen | Crude whole-cell H5 HA mutK+ protein expressed in insect |
| | cells by a baculovirus-based expression system. |
| Formula- | An experimental vaccine comprised of cultured insect cells |
| tion | and supernatant expressing recombinant H5 HA. The vaccine |
| | was adjuvanted with Polygen. |
| Generic | 511 |
| product | |
| name | |
| Antigen | Crude whole-cell H5 HA mutK+ protein expressed in insect |
| | cells by a baculovirus-based expression system. |
| Formula- | An experimental vaccine comprised of cultured insect cells |
| tion | and supernatant expressing recombinant H5 HA. The vaccine |
| | was adjuvanted with Emulsigen-P. |
| Generic | 512 |
| product | |
| name | |
| Antigen | Crude whole-cell H5 HA mutK+ protein expressed in insect |
| | cells by a baculovirus-based expression system. |
| Formula- | An experimental vaccine comprised of cultured insect cells |
| tion | and supernatant expressing recombinant H5 HA. The vaccine |
| | was adjuvanted with Carbigen. |
| Generic | 513 |
| product | |
| name | |
| Antigen | Crude whole-cell H5 HA mutK+ protein expressed in insect |
| | cells by a baculovirus-based expression system. |
| Formula- | An experimental vaccine comprised of cultured insect cells |
| tion | and supernatant expressing recombinant H5 HA. The vaccine |
| | was adjuvanted with Emulsigen-75. |
| Generic | 514 |
| product | |
| name | |
| Antigen | Crude whole-cell H5 HA K+ protein expressed in insect cells |
| | by a baculovirus-based expression system. |
| Formula- | An experimental vaccine comprised of cultured insect cells |
| tion | and supernatant expressing recombinant H5 HA. The vaccine |
| | was adjuvanted with ISA 70. |

### Example 3

### Vaccination of Chicken Against Avian Influenza

[0301] A combination vaccine comprising H5 HA Mutk+ (Fraction 1) and inactivated Newcastle disease virus (Fraction 2), named “BACULO AI+ND KV” has been evaluated in animal trials. The vaccine was formulated with the haemmagglutinin H5 produced in the Baculovirus expression system based on the MutK+ construct (Examples 1 and 2). The origin of the Newcastle Disease (ND) virus fraction is the whole virus.

[0302] Fraction 1: Avian Influenza (AI) fraction.

[0303] Recombinant, baculovirus-expressed, H5 hemagglutinin (H5 HA) from Avian Influenza H5N1 virus. AI fraction is inactivated with binary ethyleneimine (BEI). No residual infectivity coming from Baculovirus vector is allowed.

[0304] Fraction 2: Newcastle Disease Fraction.

[0305] Whole virion, Newcastle Disease Virus (ND), LaSota Strain. ND fraction is inactivated with Formaldehyde, BEI or Beta-Propio-Lactone (BPL). No residual infectivity coming from ND virus is allowed.

[0306] Formula Composition:

[0307] Inactivated harvest material from H5 HA protein and ND are blended into a water/oil emulsion. The mixture includes mineral oil as an adjuvant.

[0308] For evaluation of vaccine efficacy, three clinical parameters were considered: 1) Morbility/mortality. 2) Antibodies levels. 3) Viral shedding.

[0309] In all studies SPF chickens were vaccinated, administration of the vaccine was by subcutaneous route, in the back of the neck. A dose of 0.5 ml was administered unless otherwise stated.

[0310] Chickens were maintained inside isolator units during the whole duration of the studies. Studies were compliant with OIE international guidelines for evaluation of Avian Influenza vaccines.

[0311] Challenge was conducted to evaluate the Avian Influenza (AI) antigenic fraction. Chickens were inoculated 3 weeks after vaccination by the intra-nasal (50 n1) and oral (50 n1) route administering a total of 100 n1 of allantoic fluid containing 10⁶ EID₅₀ of the challenge virus.

[0312] To evaluate protection from challenge against HPAI H5N1 two studies were conducted:

[0313] (1) Protectotypes study: Using a single or double vaccination (evaluating boosting effect), ages of 1 day old or 10 days old chickens (evaluating age effect), and doses of 0.5 or 0.2 ml (evaluating dose effect).

[0314] Two different challenge strains were used for this study: a) A subclade 2.3.2 Vietnamese strain (isolated in 2006) which has been recently causing disease in South-East-Asia (China, Vietnam) Poultry production. b) A subclade 2.2.1 group B1 Egyptian strain (isolated in 2010), which has been recently causing disease in Egyptian Poultry production. Challenge strains are not genetically close to the vaccine baculovirus construct (MutK+). Results are interpreted in the context of protectotypes as broadening up the protection conferred for two immunizations with similar or different vaccines.

[0315] Conclusions Protectotypes Study:

[0316] 1) Protection between 80 and 100% was observed depending on the age or dose. 100% protection was observed when administered as 0.5 ml dose at 10 days old of the bivalent formulation.

[0317] 2) When administered as a single 0.5 ml immunization of BACULO AI+ND KV at 10 days of age, the same protection is observed than administering two shots of the inactivated traditionally-produced commercial Volvac AI KV vaccine.

[0318] 3) When administered as a single 0.5 ml immunization of BACULO AI+ND KV at 10 days of age, similar level of H5-specific antibodies were detected in comparison with administering two shots of the inactivated traditionally-produced commercial Volvac AI KV vaccine.

[0319] 4) Low levels of viral shedding were observed until 3 days post-challenge, when the vaccine was administered as a single 0.5 ml immunization of BACULO AI+ND KV at 10 days of age.

[0320] (2) BACULO efficacy study: using a single, unique vaccination at 10 days of age.

[0321] Three different challenge strains were used for this study: a) A subclade 2.2.1 Egyptian strain (isolated in 2008). b) A subclade 2.2.1 group A1 Egyptian strain (isolated in 2010). c) A subclade 2.2.1 group B1 Egyptian strain (isolated in 2010). The last two have been recently causing disease in Egyptian Poultry production.

[0322] Conclusions BACULO efficacy study:

[0323] 1) Protection between 90 and 100% was observed.

[0324] 2) Vaccine BACULO AI+ND KV showed performance compliant with European Medicine Agency (EMA) guidelines for vaccines against HPAI virus in birds.

[0325] 3) This is the first report available demonstrating efficacy with a single shot administration for a baculovirus-based vaccine including a hemagglutinin genetically distant from those of the viruses used for challenge.

### Example 4

[0326] (1) Experimental design: This experiment was designed and conducted similar to the above described Example 3: For evaluation of vaccine efficacy, three clinical

[0327] parameters were considered: 1) Morbility/mortality. 2) Antibodies levels. 3) Viral shedding.

[0328] In all studies SPF chickens were vaccinated, the administration of the vaccine was by subcutaneous route, in the back of the neck. A vaccine prototype containing a clade 1 H5 protein was used (called Mut K+) formulated as a bivalent product with a second, ND (Newcastle disease virus) antigenic fraction.

[0329] A dose of 0.5 ml was administered unless otherwise stated Animals were vaccinated at 10 days of age.

[0330] Chickens were maintained inside isolator units during the whole duration of the studies. Studies were compliant with OIE international guidelines for evaluation of Avian Influenza vaccines.

[0331] Challenge was conducted to evaluate the Avian Influenza (AI) antigenic fraction. Chickens were inoculated 3 weeks after vaccination by the intra-nasal (50 μl) and oral (50 μl) route administering a total of 100 μl of allantoic fluid containing 10⁶ EID₅₀ of the challenge virus.

[0332] This is also summarized in the table (Table a) below (Vaccination was performed at 10 days of age, column 1 (ID of experimental groups according to the vaccine applied), column 2 (Vaccine dose), and column 3 (Challenge age)).

[0333] Challenge virus was A/Chicken/Egypt/1063/2010, which is classified as subclade 2.2.1.1 HP AIV H5N1 subtype. This is the official challenge strain used in Egypt for evaluation of vaccine batches. The challenge dose was 10⁶ EID₅₀.

[0334] (2) Results & Data analysis: Results & Data analysis are summarized in the table below (Table a): Column 4 (HI GMT (Geometric Mean Titer) 3 weeks post-vaccination, pre-challenge), column 5 (Percentage of survival, 2 weeks post-challenge), and column 6 (Detection of viral shedding, RT-PCR positive samples).

[0335] Results & Data analysis are summarized in the table below (Table a): Column 4 (HI GMT (Geometric Mean Titer) 3 weeks post-vaccination, pre-challenge), column 5 (Percentage of survival, 2 weeks post-challenge), and column 6 (Detection of viral shedding, RT-PCR positive samples).

TABLE a
Summary of the experimental design and of the results and data analysis of
Example 4.

| Experimental | | | | | | |
|---|---|---|---|---|---|---|
| group | | | | | Percentage | |
| (10 | | Challenge | GMT measured at | | of | Viral Shedding- |
| chickens | | dose | 31 days of age | | survival | Detection of |
| each) | Vaccine | (age) | Homologous | Heterologous | post- | viral RNA using |
| -Vaccine | Dose | -Strain | (vaccine | (challenge | challenge | RT-PCR- |
| ID- | (age) | 1063- | strain) | virus) | (%) | (#positives/total) |
| Mut K+ | 0.5 ml | 10⁶ | 9.1 | 0.9 | 100 | 2/10 |
| No vaccine | (10 days | EID₅₀ | — | — | 0 | 10/10 |
| | of age) | (31 days | | | | |
| | | of age) | | | | |

[0336] (3) Conclusions:

[0337] The vaccinated group survived the challenge. The vaccine prototype triggered an efficient immune response, as measured as HI titration using the homologous antigen.

[0338] The Mut K+ vaccine prototype provided good virological protection, as measured as ability to reduce viral shedding. RT-PCR Ct values were far too low to represent infectious virus but only residual genetic material.

### Example 5

[0339] (1) Experimental Design: The described experiment is designed to show the efficacy of a vaccine prototype only containing a clade 1 H5 protein (called Mut K+).

[0340] For evaluation of vaccine efficacy, three clinical parameters are considered: 1) Morbility/mortality. 2) Antibodies levels. 3) Viral shedding.

[0341] In all studies SPF chickens are vaccinated, the administration of the vaccine is by the subcutaneous route, in the back of the neck. A vaccine prototype containing a clade 1 H5 protein is used (called Mut K+) formulated as a monovalent product.

[0342] A dose of 0.5 ml is administered unless otherwise stated. Animals are vaccinated at 10 days of age.

[0343] Chickens are maintained inside isolator units during the whole duration of the studies. Studies are compliant with OIE international guidelines for evaluation of Avian Influenza vaccines.

[0344] Challenge is conducted to evaluate the efficacy of the vaccine in regard to the Avian Influenza (AI) antigenic fraction. Chickens are inoculated 3 weeks after vaccination by the intra-nasal (50 μl) and oral (50 μl) route administering a total of 100 μl of allantoic fluid containing 10⁶ EID₅₀ of the challenge virus.

[0345] This is also summarized in the tables below (See Table b and Table c). Vaccination was performed at 10 days of age. Column 1 (ID of experimental groups according to the vaccine applied), column 2 (Vaccine dose), and column 3 (Challenge age)).

[0346] Challenge virus is either A/Chicken/Egypt/1063/2010 (classified as subclade B or subclade 2.2.1.1 HP AIV H5N1 subtype) or A/chicken/Egypt/3982-8/2010 (classified as subclade A or subclade 2.2.1 HP AIV H5N1 subtype)

[0347] The A/Chicken/Egypt/1063/2010 was the official challenge strain used in Egypt for evaluation of vaccine batches until the end of 2012. The challenge dose is in any case 10⁶ EID₅₀.

TABLE b
Summary of the experimental design of Example 5.

| 1 | | |
|---|---|---|
| Experimental group | 2 | 3 |
| (10 chickens each) | Vaccine Dose | Challenge dose (age) |
| -Vaccine ID- | (age) | -Strain 1063- |
| Mut K+ | 0.5 ml | 10⁶ EID₅₀ |
| No vaccine | (10 days of age) | (31 days of age) |

TABLE c
Summary of the experimental design of Example 5.

| 1 | | |
|---|---|---|
| Experimental group | 2 | 3 |
| (10 chickens each) | Vaccine Dose | Challenge dose (age) |
| -Vaccine ID- | (age) | -Strain 3982-8 |
| Mut K+ | 0.5 ml | 10⁶ EID₅₀ |
| No vaccine | (10 days of age) | (31 days of age) |

[0348] (2) Conclusions:

[0349] The chickens of the vaccinated group (Table c) survive the challenge with A/chicken/Egypt/3982-8/2010 and nearly all chickens of the vaccinated group (Table b) survive the challenge with A/Chicken/Egypt/1063/2010. The vaccine prototype induces an efficient immune response, as measured by determination of the HI titer using the homologous antigen.

The Mut K+ vaccine prototype provides sufficient protection in regard to shedding of the challenge virus, as measured as ability to reduce viral shedding. The RT-PCR Ct values are very low and represent rather only residual virus genetic material instead infectious virus.

[0350] In the sequence listing (SEQ ID NOs: 1 to 50 and 139):

SEQ ID NO: 1 corresponds to H5 of A/Hong Kong/213/2003(H5N1) without signal peptide,
SEQ ID NOs: 2-7 correspond to SEQ ID NOs: 1-6 of the international (PCT) application number PCT/US2007/082699,
SEQ ID NO: 8 corresponds to H5 sequence of H5N1 “1709-6”,
SEQ ID NO: 9 corresponds to H5 sequence of H5N1 “1553-1/A1”,
SEQ ID NO: 10 corresponds to H5 sequence of H5N1 “1553-15/A1”,
SEQ ID NO: 11 corresponds to H5 sequence of H5N1 “2095-50/A1”,
SEQ ID NO: 12 corresponds to H5 sequence of H5N1 “3982-2/A1”,
SEQ ID NO: 13 corresponds to H5 sequence of H5N1 “3982-5/A1”,
SEQ ID NO: 14 corresponds to H5 sequence of H5N1 “3982-7/A1”,
SEQ ID NO: 15 corresponds to H5 sequence of H5N1 “3982-8/A1”,
SEQ ID NO: 16 corresponds to H5 sequence of H5N1 “3982-9/A1”,
SEQ ID NO: 17 corresponds to H5 sequence of H5N1 “3982-12/A1”,
SEQ ID NO: 18 corresponds to H5 sequence of H5N1 “3982-20/A1”,
SEQ ID NO: 19 corresponds to H5 sequence of H5N1 “3982-44/A1”,
SEQ ID NO: 20 corresponds to H5 sequence of H5N1 “1553-2B1”,
SEQ ID NO: 21 corresponds to H5 sequence of H5N1 “1553-6/B1”,
SEQ ID NO: 22 corresponds to H5 sequence of H5N1 “1553-13/B2”,
SEQ ID NO: 23 corresponds to H5 sequence of H5N1 “1553-26/B2”,
SEQ ID NO: 24 corresponds to H5 sequence of H5N1 “1553-28/B1”,
SEQ ID NO: 25 corresponds to H5 sequence of H5N1 “2095-39/B2”,
SEQ ID NO: 26 corresponds to H5 sequence of H5N1 “2095-46/B1”,
SEQ ID NO: 27 corresponds to H5 sequence of H5N1 “2095-49/B1”,
SEQ ID NO: 28 corresponds to H5 sequence of H5N1 “2095-65/B1”,
SEQ ID NO: 29 corresponds to H5 sequence of H5N1 “2095-68/B2”,
SEQ ID NO: 30 corresponds to H5 sequence of H5N1 “2095-70/B2”,
SEQ ID NO: 31 corresponds to H5 sequence of H5N1 “2095-73/B2”,
SEQ ID NO: 32 corresponds to H5 sequence of H5N1 “2095-75/B2”,
SEQ ID NO: 33 corresponds to H5 sequence of H5N1 “3982-3/B1”,
SEQ ID NO: 34 corresponds to H5 sequence of H5N1 “3982-4/B1”,
SEQ ID NO: 35 corresponds to H5 sequence of H5N1 “3982-13/B1”,
SEQ ID NO: 36 corresponds to H5 sequence of H5N1 “3982-14/B2”,
SEQ ID NO: 37 corresponds to H5 sequence of H5N1 “3982-19/B3”,
SEQ ID NO: 38 corresponds to H5 sequence of H5N1 “3982-21/B2”,
SEQ ID NO: 39 corresponds to H5 sequence of H5N1 “3982-43/B1”,
SEQ ID NO: 40 corresponds to H5 sequence of H5N1 “3982-50/B1”,
SEQ ID NO: 41 corresponds to H5 sequence of H5N1 “3982-52/B1”,
SEQ ID NO: 42 corresponds to H5 sequence of H5N1 “3982-55/A1”,
SEQ ID NO: 43 corresponds to H5 sequence of H5N1 “3982-56/A1”,
SEQ ID NO: 44 corresponds to H5 sequence of H5N1 “3982-78/B2”,
SEQ ID NO: 45 corresponds to H5 sequence of H5N1 “4794-17/B”,
SEQ ID NO: 46 corresponds to H5 sequence of H5N1 “4794-18/B”,
SEQ ID NO: 47 corresponds to H5 sequence translated from SEQ ID NO: 50,
SEQ ID NO: 48 codes for a H5 sequence of H5N1 “3982-8/A1” (SEQ ID NO: 15),
SEQ ID NO: 49 codes for a H5 sequence of H5N1 “1553-2/B1” (SEQ ID NO: 20),
SEQ ID NO: 50 corresponds to the consensus sequence obtained after analysis of the 38 H5 HA gene sequences coding for SEQ ID NOs: 9 to 46,
SEQ ID NO: 139 corresponds to the cDNA of Newcastle Disease Virus LaSota strain.

TABLE A
The following list is an alignment of the sequences as set forth in SEQ
ID Nos: 9 to 46, wherein the single letter code for amino acids is used:

| | ....\|....\| | ....\|....\| | ....\|....\| | ....\|....\| | ....\|....\| | ....\|....\| |
|---|---|---|---|---|---|---|
| | 5 | 15 | 25 | 35 | 45 | 55 |
| 1553-1/A1 | MEKIMLLLAI | VSLVKSDQIC | IGYHANNSTE | QVDTIMEKNV | TVTHAQDILE | KTHNGKLCNL |
| 1553-15/A1 | MEKIVLLLAI | VSIVKSDQIC | IGYHANNSTE | QVDTIMEKNV | TVTHAQDILE | KTHNGKLCNL |
| 2095-50/A1 | MEKIVLLLAI | VSLVKGDQIC | IGYHANNSTE | QVDTIMEKNV | TVTHAQDILE | KTHNGKLCNL |
| 3982-2/A1 | -----XLLAI | VSIVKSDQIC | IGYHANNSTE | QVDTIMEKNV | TVTHAQDILE | KTHNGKLCNL |
| 3982-5/A1 | ---------- | --XVKSDQIC | IGYHANNSTE | QVDTIMEKNV | TVTHAQDILE | KTHNGKLCNL |
| 3982-7/A1 | ---------- | --XVKSDQIC | IGYHANNSTE | QVDTIMEKNV | TVTHAQDILE | KTHNGKLCNL |
| 3982-8/A1 | --------XI | VSIVKSDQIC | IGYHANNSTE | QVDTIMEKNV | TVTHAQDILE | KTHNGKLCNL |
| 3982-9/A1 | ---------- | --XVKSDQIC | IGYHANNSTE | QVDTIMEKNV | TVTHAQDILE | KTHNGKLCNL |
| 3982-12/A1 | ---------- | XSIVKSDQIC | IGYHANNSTE | QVDTIMEKNV | TVTHAQDILE | KTHNGKLCNL |
| 3982-20/A1 | --------XI | VSIVKSDQIC | IGYHANNSTE | QVDTIMEKNV | TVTHAQDILE | KTHNGKLCNL |
| 3982-44/A1 | ---------- | --XVKSDQIC | IGYHANNSTE | QVDTIMEKNV | TVTHAQDILE | KTHNGKLCNL |
| 1553-2/B1 | MEKIVLLLAI | VSLVKSDQIC | IGYHANNSTE | QVDTIMEKNV | TVTHAQDILE | KTHNGKLCDL |
| 1553-6/B1 | MEKIVLLLAI | VSLVKSDQIC | IGYHANNSTE | QVDTIMEKNV | TVTHAQDILE | KTHNGKLCDL |
| 1553-13/B2 | MEKIVLLLAI | VSLVKSDQIC | IGYHANNSTE | QVDTIMEKNV | TVTHAQDILE | KTHNGKLCDL |
| 1553-26/B2 | MEKIVLLLAI | VSLVKSDQIC | IGYHANNSTE | QVDTIMEKNV | TVTHAQDILE | KTHNGKLCDL |
| 1553-28/B1 | MEKIVLLLAI | VSLVKSDQIC | IGYHANNSTE | QVDTIMEKNV | TVTHAQDILE | KTHNGKLCDL |
| 2095-39/B2 | MEKIVLLLAI | VSLVKSDQIC | IGYHANNSTE | QVDTIMEKNV | TVTHAQDILE | KTHNGKLCDL |
| 2095-46/B1 | -----XLLAI | VSLVKSDQIC | IGYHANNSTE | QVDTIMEKNV | TVTHAQDILE | KTHNGKLCDL |
| 2095-49/B1 | ----VLLLAI | VSLVKSDQIC | IGYHANNSTE | QVDTIMEKNV | TVTHAQDILE | KTHNGKLCDL |
| 2095-65/B1 | ---XVLLLAI | ISLVKSDQIC | IGYHANNSTE | QVDTIMEKNV | TVTHAQDILE | KTHNGKLCDL |
| 2095-68/B2 | ---IVLLLAI | VSLVKSDQIC | IGYHANNSTE | QVDTIMEKNV | TVTHAQDILE | KTHNGKLCDL |
| 2095-70/B2 | ------LLAI | VSLVKSDQIC | IGYHANNSTE | QVDTIMEKNV | TVTHAQDILE | KTHNGKLCDL |
| 2095-73/B2 | ---IVLLLAI | VSLVKSDQIC | IGYHANNSTE | QVDTIMEKNV | TVTHAQDILE | KTHNGKLCDL |
| 2095-75/B2 | ---IVLLLAI | VSLVKSDQIC | IGYHANNSTE | QVDTIMEKNV | TVTHAQDILE | KTHNGKLCDL |
| 3982-3/B1 | ----XLLLAI | VSLVKSDQIC | IGYHANNSTE | QVDTIMEKNV | TVTHAQDILE | KTHNGKLCDL |
| 3982-4/B1 | ---------- | --XVKSDQIC | IGYHANNSTE | QVDTIMEKNV | TVTHAQDILE | KTHNGKLCDL |
| 3982-13/B1 | ---------- | ----XSDQIC | IGYHANNSTE | QVDTIMEKNV | TVTHAQDILE | KTHNGKLCDL |
| 3982-14/B2 | ---------- | ----KGDQIC | IGYHANNSTE | QVDTIMEKNV | TVTHAQDILE | KTHNGKLCDL |
| 3982-19/B3 | ---------- | ---------- | --XHANNSTE | QVDTIMEKNI | TVTHAQDILE | KTHNGKLCDL |
| 3982-21/B2 | ---------- | -XLVKSDQIC | IGYHANNSTE | QVDTIMEKNV | TVTHAQDILE | KTHNGKLCDL |
| 3982-43/B1 | ---------- | ----KSDQIC | IGYHANNSTE | QVDTIMEKNV | TVTHAQDILE | KTHNGKLCDL |
| 3982-50/B1 | ---------- | --XVKSDQIC | IGYHANNSTE | QVDTIMEKNV | TVTHAQDILE | KTHNGKLCDL |
| 3982-52/B1 | ---------- | -XLVKSDQIC | IGYHANNSTE | QVDTIMEKNV | TVTHAQDILE | KTHNGKLCDL |
| 3982-55/A1 | ---------- | --XVKSDQIC | IGYHANNSTE | QVDTIMEKNV | TVTHAQDILE | KTHNGKLCNL |
| 3982-56/A1 | ---------- | ---------- | --XHANNSTE | QVDTIMEKNV | TVTHAQDILE | KTHNGKLCNL |
| 3982-78/B2 | ---------- | ---------- | ---HANNSTE | QVDTIMEKNV | TVTHAQDILE | KTHNGKLCDL |
| 4794-17/B | ------LLAI | VSLVKSDQIC | IGYHANNSTE | QVDTIMEKNV | TVTHAQDILE | KTHNGKLCDL |
| 4794-18/B | ------XLAI | VSLVKSDQIC | IGYHANNSTE | QVDTIMEKNV | TVTHAQDILE | KTHNGKLCDL |
| | ....\|....\| | ....\|....\| | ....\|....\| | ....\|....\| | ....\|....\| | ....\|....\| |
| | 65 | 75 | 85 | 95 | 105 | 115 |
| 1553-1/A1 | DGVKPLILRD | CSVAGWLLGN | PMCDEFLNVP | EWSYIVEKIN | PANDLCYPGK | FNDYEELKHL |
| 1553-15/A1 | DGVKPLILRD | CSVAGWLLGN | PMCDEFLNVP | EWSYIVEKIN | PANDLCYPGN | FNDYEELKHL |
| 2095-50/A1 | DGVKPLILRD | CSVAGWLLGN | PMCDEFLNVP | EWSYIVEKIY | PANDLCYPGN | FNDYEELKHL |
| 3982-2/A1 | DGVKPLILRD | CSVAGWLLGN | PMCDEFLDVP | EWSYIVEKIN | PANDLCYPGN | FNDYEELKHL |
| 3982-5/A1 | DGVKPLILRD | CSVAGWLLGN | PMCDEFLNV- | EWSYIVEKIN | PTNDLCYPGN | FNDYEELKHL |
| 3982-7/A1 | DGVKPLILRD | CSVAGWLLGN | PMCDKFLNVP | EWSYIVEKIN | PTNDLCYPGN | FNDYEELKHL |
| 3982-8/A1 | DGVKPLILRD | CSVAGWLLGN | PMCDEFLNVP | EWSYIVEKIN | PTNDLCYPGN | FNDYEELKHL |
| 3982-9/A1 | DGVKPLILRD | CSVAGWLLGN | PMCDEFLNVP | EWSYIVEKIN | PANDLCYPGN | FNDYEELKHL |
| 3982-12/A1 | DGVKPLILRD | CSVAGWLLGN | PMCDEFLNVP | EWSYIVEKIN | PANDLCYPGN | FNDYEELKHL |
| 3982-20/A1 | DGVKPLILRD | CSVAGWLLGN | PMCDEFLNVP | EWSYIVEKIN | PANDLCYPGN | FNDYEELKHL |
| 3982-44/A1 | DGVKPLILRD | CSVAGWLLGN | PMCDEFLNVP | EWSYIVEKIN | PANDLCYPGN | FNDYEELKHL |
| 1553-2/B1 | GGVKPLILRD | CSVAGWLLGN | PMCDEFPNVS | EWSYIVEKIN | PANDLCYPGN | FNNYEELKHL |
| 1553-6/B1 | DGVKPLILRD | CSVAGWLLGN | PMCDEFPNVS | EWSYIVEKTN | PANDLCYPGN | FNNYEELKHL |
| 1553-13/B2 | DGVKPLILRD | CSVAGWLLGN | PMCDEFPNVS | EWSYIVEKIN | PANDLCYPGN | FNNYEELKHL |
| 1553-26/B2 | DGVKPLILRD | CSVAGWLLGN | PMCDEFPNVS | EWSYIVEKIN | PANDLCYPGN | FNNYEELKHL |
| 1553-28/B1 | DGVKPLILRD | CSVAGWLLGN | PMCDEFPNVS | EWSYIVEKIN | PANDLCYPGN | FNNYEELKHL |
| 2095-39/B2 | DGVKPLILRD | CSVAGWLLGN | PMCDEFPNVS | EWSYIVEKTN | PANDLCYPGN | FNNYEELKHL |
| 2095-46/B1 | DGVKPLILRD | CSVAGWLLGN | PMCDEFPNVS | EWSYIVEKIN | PANDLCYPGN | FNNYEELKHL |
| 2095-49/B1 | DGVKPLILRD | CSVAGWLLGN | PMCDEFPNVS | EWSYIVEKIN | PANDLCYPGN | FNNYEELKHL |
| 2095-65/B1 | DGVKPLILRG | CSVAGWLLGN | PMCDEFPNVS | EWSYIVEKIN | PANDLCYPGN | FNNYEELKHL |
| 2095-68/B2 | DGVKPLILRD | CSVAGWLLGN | PMCDEFPNVS | EWSYIVEKIN | PANDLCYPGN | FNNYEELKHL |
| 2095-70/B2 | DGVKPLILRD | CSVAGWLLGN | PMCDEFPNVS | EWSYIVEKIN | PANDLCYPGN | FNNYEELKHL |
| 2095-73/B2 | DGVKPLILRD | CSVAGWLLGN | PMCDEFPNVS | EWSYIVEKIN | PANDLCYPGN | FNNYEELKHL |
| 2095-75/B2 | DGVKPLILRD | CSVAGWLLGN | PMCDEFPNVS | EWSYIVEKIN | PANDLCYPGN | FNNYEELKHL |
| 3982-3/B1 | DGVKPLILRD | CSVAGWLLGN | PMCDEFPNVS | EWSYIVEKIN | PANDLCYPGN | FNNYEELKHL |
| 3982-4/B1 | DGVKPLILRD | CSVAGWLLGN | PMCDEFPNVS | EWSYIVEKIN | PANDLCYPGN | FNNYEELKHL |
| 3982-13/B1 | DGVKPLILRD | CSVAGWLLGN | PMCDEFPNVS | EWSYIVEKIN | PANDLCYPGN | FNNYEELKHL |
| 3982-14/B2 | DGVKPLILRD | CSVAGWLLGN | PMCDEFPNVS | EWSYIVEKIN | PANDLCYPGN | FNNYEELKHL |
| 3982-19/B3 | DGVKPLILRD | CSVAGWLLGN | PMCDEFLNVS | EWSYIVEKIN | PANDLCYPGN | FNNYEELKHL |
| 3982-21/B2 | DGVKPLILRD | CSVAGWLLGN | PMCDEFPNVS | EWSYIVEKIN | PANDLCYPGN | FNNYEELKHL |
| 3982-43/B1 | DGVKPLILRD | CSVAGWLLGN | PMCDEFPNVS | EWSYIVEKIN | PANDLCYPGN | FNNYEELKHL |
| 3982-50/B1 | DGVKPLILRD | CSVAGWLLGN | PMCDEFPNVS | EWSYIVEKTN | PANDLCYPGN | FNNYEELKHL |
| 3982-52/B1 | DGVKPLILRD | CSVAGWLLGN | PMCDEFPNVS | EWSYIVEKIN | PANDLCYPGN | FNNYEELKHL |
| 3982-55/A1 | DGVKPLILRD | CSVAGWLLGN | PMCDKFLNVP | EWSYIVEKIN | PANDLCYPGD | FNDYEELKHL |
| 3982-56/A1 | DGVKPLILRD | CSVAGWLLGN | PMCDEFPNVL | EWSYIVEKIN | PANDLCYPGN | FNDYEELKHL |
| 3982-78/B2 | DGVKPLILRD | CSVAGWLLGN | PMCDEFPNVS | EWSYIVEKIN | PANDLCYPGN | FNNYEELKHL |
| 4794-17/B | DGVKPLILRD | CSVAGWLLGN | PMCDEFPNVS | EWSYIVEKIN | PANDLCYPGN | FNNYEELKHL |
| 4794-18/B | DGVKPLILRD | CSVAGWLLGN | PMCDEFPNVS | EWSYIVEKIN | PANDLCYPGN | FNNYEELKHL |
| | ....\|....\| | ....\|....\| | ....\|....\| | ....\|....\| | ....\|....\| | ....\|....\| |
| | 125 | 135 | 145 | 155 | 165 | 175 |
| 1553-1/A1 | LSRINHFEKI | QIIPRNSWSD | HETS-GVSSA | CQYQGRSSFF | RNVVWLTKKD | NAYSTIKRSY |
| 1553-15/A1 | LSRINHFEKI | QIIPKGSWSD | HEAS-GVSSA | CPYQGRSSFF | RNVVWLTKKN | NAYPTIKKSY |
| 2095-50/A1 | LSRINHFEKI | QIIPKSSWSD | HEAS-GVSSA | CPYQGRSSFF | RNVVWLTKKD | NAYPTIKKSY |
| 3982-2/A1 | LSRINHFEKI | QIIPKNSWSD | HETS-GVSSA | CPYQGRSSFF | RNVVWLTKKN | TAYPTIKKSY |
| 3982-5/A1 | LSRINHFEKI | QIIPKNYWSD | HETS-GVSSA | CPYQGRPSFF | RNVVWLTKKN | NAYPTIKKSY |
| 3982-7/A1 | LSRINHFEKI | QIIPKNSWSD | HEAS-GVSSA | CPYQGRSSFF | RNVVWLTKKN | NAYPTIKKSY |
| 3982-8/A1 | LSRINHFEKI | QIIPKNSWSD | HEAS-GVSSA | CPYQGRSSFF | RNVVWLTKKN | NAYPTIKKSY |
| 3982-9/A1 | LSRINHFEKI | QIIPKNSWSD | HEAS-GVSSA | CPYQGRSSFF | RNVVWLTKKN | NXYPTIKKSY |
| 3982-12/A1 | LSRINHFEKI | QIIPKNSWSD | HEAS-GVSSA | CPYQGRSSFF | RNVVWLTKKN | NAYPTIKKSY |
| 3982-20/A1 | LSRINHFEKI | QIIPKNSWSD | HEAS-GVSSA | CPYQGRSSFF | RNVVWLTKKN | NAYPTIKKSY |
| 3982-44/A1 | LSRINHFEKI | QIIPKNSWSD | HEAS-GVSSA | CPYQGRSSFF | RNVVWLTKKD | NAYPTIKRSY |
| 1553-2/B1 | LSRINRFEKI | QIIPKSSWPD | HEASLGVSSA | CPYQGGPSFY | RNVVWLIKKN | DTYPTIKESY |
| 1553-6/B1 | LSRINRFEKI | KIIPKSSWPD | HEASLGVSSA | CPYQGEPSFY | RNVVWLIKKN | NTYPTIKESY |
| 1553-13/B2 | LSRINRFEKI | KIIPKSSWPD | HEASLGVSSA | CPYQRGPSFY | RNVVWLIKKN | NTYPTIKKSY |
| 1553-26/B2 | LSRINRFEKI | KIIPKSSWPD | HEASLGVSSA | CPYQGGPSFY | RNVVWLIKKN | NTYPTIKESY |
| 1553-28/B1 | LSRINRFEKI | QIIPKSSWPD | HEASLGVSSA | CPYQGEPSFY | RNVVWLIKKN | NTYPTIKESY |
| 2095-39/B2 | LSRINRFEKI | KIIPKSSWPD | HEASLGVSSA | CPYQGRPSFY | RNVVWLIKKN | NTYPTIKESY |
| 2095-46/B1 | LSRINRFEKI | QIIPKSSWPD | HEASLGVSSA | CPYQGEPSFY | RNVVWLIKKN | NTYPTIKENY |
| 2095-49/B1 | LSRINRFEKI | QIIPKSSWPD | HEASLGVSSA | CPYQGEPSFY | RNVVWLIKKN | NTYPTIKENY |
| 2095-65/B1 | LSRINRFEKI | QIIPKSSWPD | HEASLGVSSA | CPYQGEPSFY | RNVVWLIKKN | NTYPTIKESY |
| 2095-68/B2 | LSRINRFEKI | KIIPKSSWPD | HEASLGVSSA | CPYQGGPSFY | RNVVWLIKKN | NTYPTIKKSY |
| 2095-70/B2 | LSRINRFEKI | KIIPKXSWPD | HEASLGVSSA | CPYQGGPSFY | RNVVWLIKKN | NTYPTIKESY |
| 2095-73/B2 | LSRINRFEKI | KIIPKSSWPD | HEASLGVSSA | CPYQEGPSFY | RNVVWLIKKN | NTYPTIKKSY |
| 2095-75/B2 | LSRINRFEKI | KIIPKSSWPD | HEASLGVSSA | CPYQGGXSFY | RNVVWLIKKN | NTYPTIKESY |
| 3982-3/B1 | LSRINRFEKI | QIIPKSSWPD | HEASLGVSSA | CPYQGEPSFY | RNVVWLIKKN | NTYPTIKENY |
| 3982-4/B1 | LSRINRFEKI | QIIPKSSWPD | HEASLGVSSA | CPYQGEPSFY | RNVVWLIKKN | NTYPTIKESY |
| 3982-13/B1 | LSRINRFEKI | QIIPKSSWPD | HEASLGVSSA | CPYQGEPSFY | RNVVWLIKKN | NTYPTIKENY |
| 3982-14/B2 | LSRINRFEKI | KIIPKSSWPD | HEASLGVSSA | CPYQGGPSFY | RNVVWLIKKN | NTYPTIKESY |
| 3982-19/B3 | LSRINRFEKI | QIISKNSWPD | HEASLGVSAA | CPYQGGLSFY | RNVVWLIEKN | NTYPLIKKNY |
| 3982-21/B2 | LSRINRFEKI | KIIPKSSWPD | HEASLGVSSA | CPYQRGPSFY | RNVVWLIKKN | NTYPTIKKSY |
| 3982-43/B1 | LSRINRFEKI | QIIPKSSWPD | HEASLGVSSA | CPYQGGPSFY | RNVVWLIKKN | DTYPTIKESY |
| 3982-50/B1 | LSRINRFEKI | KIIPKSSWPD | HEASLGVSSA | CPYQGEPSFY | RNVVWLIKKN | NTYPTIKESY |
| 3982-52/B1 | LSRINRFEKI | QIIPKSSWPD | HEASLGVSSA | CPYQGGPSFY | RNVVWLIKKN | DTYPTIKESY |
| 3982-55/A1 | LSRINHFEKI | QIIPKNSWSD | HEAS-GVSSA | CPYQGRSSFF | RNVVWLTKKN | NAYPTIKKSY |
| 3982-56/A1 | LSRINHFEKI | QIIPKNSWSD | HEAS-GVSSA | CPYQRRSSFF | RNVVWLTKKN | NAYPTIKKSY |
| 3982-78/B2 | LSRINRFEKI | KIIPKSSWPD | HEASLGVSSA | CPYQGGPSFY | RNVVWLIKKN | NTYPTIKKSY |
| 4794-17/B | LSRINRFEKI | KIIPKSSWPD | HEASLGVSSA | CPYQGGPSFY | RNVVWLIKKN | NTYPTIKESY |
| 4794-18/B | LSRINRFEKI | KIIPKSSWPD | HEASLGVSSA | CPYQGGPSFY | RNVVWLTKKN | NTYPTIKKSY |
| | ....\|....\| | ....\|....\| | ....\|....\| | ....\|....\| | ....\|....\| | ....\|....\| |
| | 185 | 195 | 205 | 215 | 225 | 235 |
| 1553-1/A1 | NNTNQEDLLV | LWGIHHPNDA | AEQTRLYQNP | TTYISVGTST | LNQRLVPKIA | TRSKVNGQSG |
| 1553-15/A1 | NNTNQEDLLV | LWGIHHPNDA | AEQTRLYQNP | TTYISVGTST | LNQRLVPKIA | TRSKVNGQSG |
| 2095-50/A1 | NNTNQEDLLI | LWGIHHPNDA | AEQTRLYQNP | TTYISVGTST | LNQRLVPKIA | TRSKVNGQSG |
| 3982-2/A1 | NNTNQEDLLV | LWGIHHPNDA | AEQTRLYQNP | TTYISVGTST | LNQRLVPKIA | TRSKVNGQSG |
| 3982-5/A1 | NNTNQEDLLV | LWGIHHPNDA | AEQTRLYQNP | TTYISVGTST | LNQRLVPKIA | TRSKVNGQSG |
| 3982-7/A1 | NNTNQEDLLV | LWGIHHPNDA | AEQTRLYQNP | TTYISVGTST | LNQRLVPKIA | TRSKVNGQSG |
| 3982-8/A1 | NNTNQEDLLV | LWGIHHPNDA | AEQTRLYQNP | TTYISVGTST | LNQRLVPKIA | TRSKVNGQSG |
| 3982-9/A1 | NNTNQEDLLV | LWGIHHPNDA | AEQTKLYQNP | TTYISVGTST | LNQRLVPKIA | TRSKVNGQSG |
| 3982-12/A1 | NNTNQEDLLV | LWGIHHPNDE | AEQTRLYQNP | TTYISVGTST | LNQRLVPKIA | TRSKVNGQSG |
| 3982-20/A1 | NNTNQEDLLV | LWGIHHPNDA | AEQTRLYQNP | TTYISVGTST | LNQRLVPKIA | NRSKVNGQSG |
| 3982-44/A1 | NNTNQEDLLV | LWGIHHPNDA | AEQTRLYQNP | TTYISVGTST | LNQRLVPKIA | TRSKVNGQSG |
| 1553-2/B1 | HNTNQEDLLV | LWGIHHPNNE | EEQKRIYKNP | TTYVSVGTST | LNQRLVPKIA | TRSKVNGQSG |
| 1553-6/B1 | HNTNQEDLLV | LWGIHHPNDE | EEQTRIYKNP | TTYISVGTST | LNQRLVPKIA | TRSKVNGQSG |
| 1553-13/B2 | HNTNQEDLLV | LWGIHHPNDE | EEQTRIYKNP | TTYISVGTST | LNQRLVPKIA | TRSKVNGQSG |
| 1553-26/B2 | HNTNQEDLLV | LWGIHHPNDE | EEQTRIYKNP | TTYISIGTST | LNQRLVPKIA | TRSKVNGQRG |
| 1553-28/B1 | HNTNQEDLLV | LWGIHHPNDE | EEQKRIYKNP | TTYISVGTST | LNQRLVPKIA | TRPKVNGQSG |
| 2095-39/B2 | HNTNQEDLLV | LWGIHHPNDE | EEQTRIYKNP | TTYISIGTST | LNQRLIPKIA | TRSKVNGQSG |
| 2095-46/B1 | HNTNQEDLLV | LWGIHHPNDE | EEQKRIYKNP | TTYISVGTST | LNQRLVPKIA | TRPKVNGQSG |
| 2095-49/B1 | HNTNQEDLLV | LWGIHHPNDE | EEQKRIYKNP | TTYISVGTST | LNQRLVPKIA | TRPKVNGQSG |
| 2095-65/B1 | HNTNQEDLLV | LWGIHHPNDE | EEQKRIYKNP | TTYISVGTST | LNQRLVPKIA | TRPKVNGQSG |
| 2095-68/B2 | HNTNQEDLLV | LWGIHHPNDE | EEQTRIYKNP | TTYISVGTST | LNQRLVPKIA | TRSKVNGQSG |
| 2095-70/B2 | HNTNQEDLLV | LWGIHHPNDE | EEQTRIYKNP | TTYISIGTST | LNQRLVPKIA | TRSKVNGQSG |
| 2095-73/B2 | HNTNQEDLLV | LWGIHHPNDE | EEQTRIYKNP | TTYISVGTST | LNQRLVPKIA | TRSKVNGQSG |
| 2095-75/B2 | HNTNQEDLLV | LWGIHHPNDE | EEQTRIYKNP | TTYISIGTST | LNQRLVPKIA | TRSKVNGQSG |
| 3982-3/B1 | HNTNQEDLLV | LWGIHHPNDE | EEQKRIYKNP | TTYISVGTST | LTQRLVPKIA | TRPKVNGQSG |
| 3982-4/B1 | HNTNQEDLLV | LWGIHHPNDE | EEQKRIYKNP | TTYISVGTST | LNQRLVPKIA | TRPKVNGQSG |
| 3982-13/B1 | HNTNQEDLLV | LWGIHHPNDE | EEQKRIYKNP | TTYISVGTST | LNQRLVPKIA | TRPKVNGQSG |
| 3982-14/B2 | HNTNQEDLLV | LWGIHHPNDE | EEQTRIYKNP | NTYISVGTST | LNQRLVPKIA | TRSKVNGQSG |
| 3982-19/B3 | HNTNQEDLLV | LWGIHHPNDE | AEQXRLYKNS | TTYISVGTST | LXQRLVPKIA | TRPKVNGQSG |
| 3982-21/B2 | HNTNQEDLLV | LWGIHHPNDE | EEQTRIYKNP | TTYISVGTST | LNQRLVPKIA | TRSKVNGQSG |
| 3982-43/B1 | HNTNQEDLLV | LWGIHHPNDE | EEQKRIYKNP | TTYISVGTST | LNQRLVPKIA | TRSKVNGQSG |
| 3982-50/B1 | HNTNQEDLLV | LWGIHHPNDE | EEQTRIYKNP | TTYISVGTST | LNQRLVPKIA | TRSKVNGQSG |
| 3982-52/B1 | HNTNQEDLLV | LWGIHHPNDE | EEQKRIYKNP | TTYVSVGTST | LNQRLVPKIA | TRSKVNGQSG |
| 3982-55/A1 | NNTNQEDLLV | LWGIHHPNDA | AEQTMLYQNP | TTYVSVGTST | LNQRLVPKIA | TRSKVNGQSG |
| 3982-56/A1 | NNTNQEDLLV | LWGIHHPNDA | AEQTRLYQNP | TTYISVGTST | LNQRLVPKIA | TRSKVNGQSG |
| 3982-78/B2 | HNTNQEDLLV | LWGIHHPNDE | EEQTRIYKNP | TTYISVGTST | LNQRLVPKIA | TRSKVNGQSG |
| 4794-17/B | HNINKEDLLV | LWGIHHPNDE | EEQIRIYKNP | TTYISVGTST | LNQRLVPKIA | TRSKVNGQSG |
| 4794-18/B | HNINKEDLLV | LWGIHHPNDE | EEQIRIYKNP | TTYISVGTST | LNQRLVPKIA | TRSKVNGQSG |
| | ....\|....\| | ....\|....\| | ....\|....\| | ....\|....\| | ....\|....\| | ....\|....\| |
| | 245 | 255 | 265 | 275 | 285 | 295 |
| 1553-1/A1 | RMEFFWTILK | SNDAINFESN | GNFIAPENAY | KIVKKGDSTI | MKSELEYGNC | NTKCQTPIGA |
| 1553-15/A1 | RMEFFWTILK | SNDAINFESN | GNFIAPENAY | KIVKKGDSTI | MKSELEYGNC | NTKCQTPIGA |
| 2095-50/A1 | RMEFFWTILK | SNDAINFESN | GNFIAPENAY | KIVKKGDSTI | MKSELEYGNC | NTKCQTPIGA |
| 3982-2/A1 | RMEFFWTILK | SNDAINFESN | GNFIAPENAY | KIVKKGDSTI | MKSELEYGNC | NTKCQTPIGA |
| 3982-5/A1 | RMEFFWTILK | SNDAINFESN | GNFIAPENAY | KIVKKGDSTI | MKSELEYGNC | NTKCQTPIGA |
| 3982-7/A1 | RMEFFWTILK | SNDAINFESN | GNFIAPENAY | KIVKKGDSTI | MKSELEYGDC | NTKCQTPIGA |
| 3982-8/A1 | RMEFFWTILK | SNDAINFESN | GNFIAPENAY | KIVKKGDSTI | MKSELEYGDC | NTKCQTPIGA |
| 3982-9/A1 | RMEFFWTILK | SNDAINFESN | GNFIAPENAY | KIVKKGDSTI | MKSELEYGNC | NTKCQTPIGA |
| 3982-12/A1 | RMEFFWTILK | SNDAINFESN | GNFIAPENAY | KIVKKGDSTI | MKSELEYGNC | NTKCQTPIGA |
| 3982-20/A1 | RMEFFWTILK | SNDAINFESN | GNFIAPENAY | KIVKKGDSTI | MKSELEYGNC | NTKCQTPIGA |
| 3982-44/A1 | RMEFFWTILK | SNDAINFESN | GNFIAPENAY | KIVKKGDSTI | MKSELEYGNC | NTKCQTPIGA |
| 1553-2/B1 | RVEFFWTILK | SNDTINFESN | GNFIAPENAY | KIVKKGDSTI | MKSELEYGNC | STKCQTPIGA |
| 1553-6/B1 | RVEFFWTILK | SNDTINFESN | GNFIAPENAY | KIVKKGDSTI | MKSELEYGNC | STKCQTPVGA |
| 1553-13/B2 | RVEFFWTILK | SNDTINFESN | GNFIAPENAY | KIVKKGDSTI | MKSELEYGNC | NTKCQTPIGA |
| 1553-26/B2 | RVEFFWTILK | SNDTINFESN | GNFIAPENAY | KIVKKGDSTI | MKSELEYGNC | NTKCQTPIGA |
| 1553-28/B1 | RVEFFWTILK | SNDTINFESN | GNFIAPKNAY | KIVKKGSSTI | MKSELEYGNC | STKCQTPIGA |
| 2095-39/B2 | RVEFFWTILK | SNDTINFESN | GNFIAPENAY | KIVKKGDSTI | MKSELEYGNC | NTKCQTPIGA |
| 2095-46/B1 | RVEFFWTILK | SNDTINFESN | GNFIAPKNAY | KIVKKGSSTI | MKSELEYGNC | STKCQTPIGA |
| 2095-49/B1 | RVEFFWTILK | SNDTINFESN | GNFIAPKNAY | KIVKKGSSTI | MKSELEYGNC | STKCQTPIGA |
| 2095-65/B1 | RVEFFWTILK | SNDTINFESN | GNFIAPKNAY | KIVKKGSSTI | MKSELEYGNC | STKCQTPIGA |
| 2095-68/B2 | RVEFFWTILK | SNDTINFESN | GNFIAPENAY | KIVKKGDSTI | MKSELEHGNC | NTKCQTPIGA |
| 2095-70/B2 | RVEFFWTILK | SNDTINFESN | GNFIAPENAY | KIVKKGDSTI | MKSELEYGNC | NTKCQTPIGA |
| 2095-73/B2 | RVEFFWTILK | SNDTINFESN | GNFIAPENAY | KIVKKGDSTI | MKSELEYGNC | NTKCQTPIGA |
| 2095-75/B2 | RVEFFWTILK | SNDTINFESN | GNFIAPENAY | KIVKKGDSTI | MKSELEYGNC | NTKCQTPIGA |
| 3982-3/B1 | RVEFFWTILK | SNDTINFESN | GNFIAPKNAY | KIVKKGSSTI | MKSELEYGNC | STKCQTPIGA |
| 3982-4/B1 | RVEFFWTILK | SNDTINFESN | GNFIAPKNAY | KIVKKGSSTI | MKSELEYGNC | STKCQTPIGA |
| 3982-13/B1 | RVEFFWTILK | SNDTINFESN | GNFIAPKNAY | KIVKKGSSTI | MKSELEYGNC | STKCQTPIGA |
| 3982-14/B2 | RVEFFWTILK | SNDTINFESN | GNFIAPENAY | KIVKKGDSTI | MKSELEYGNC | STKCQTPIGA |
| 3982-19/B3 | RVEFFWTILK | SNDVINFESN | GNFIAPENAY | KIVKKGDSTI | MKSDLEYGNC | STKCQTPIGA |
| 3982-21/B2 | RVEFFWTILK | SNDTINFESN | GNFIAPENAY | KIVKKGDSTI | MKSELEYGNC | NTKCQTPIGA |
| 3982-43/B1 | RVEFFWTILK | SNDTINFESN | GNFIAPENAY | KIVKKGDSTI | MKSELEYGNC | STKCQTPIGA |
| 3982-50/B1 | RVEFFWTILK | SNDTINFESN | GNFIAPENAY | KIVKKGDSTI | MKSELEYGNC | STKCQTPVGA |
| 3982-52/B1 | RVEFFWTILK | SNDTINFESN | GNFIAPENAY | KIVKKGDSTI | MKSELEYGNC | STKCQTPIGA |
| 3982-55/A1 | RMEFFWTILK | SNDAINFESN | GNFIAPENAY | KIVKKGDSTI | MKSELEYGNC | NTKCQTPIGA |
| 3982-56/A1 | RMEFFWTILK | SNDAINFESN | GNFIAPENAY | KIVKKGDSTI | MKSELEYGNC | NTKCQTPIGA |
| 3982-78/B2 | RVEFFWTILK | SNDTINFESN | GNFIAPENAY | KIVKKGDSTI | MKSELEYGNC | NTKCQTPIGA |
| 4794-17/B | RVEFFWTILK | SNDTINFESN | GNFIAPENAY | KIVKKGDSTI | MKSELEYGNC | NTKCQTPIGA |
| 4794-18/B | RVEFFWTILK | SNDTINFESN | GNFIAPENAY | KIVKKGDSTI | MKSELEYGNC | NTKCQTPIGA |
| | ....\|....\| | ....\|....\| | ....\|....\| | ....\|....\| | ....\|....\| | ....\|....\| |
| | 305 | 315 | 325 | 335 | 345 | 355 |
| 1553-1/A1 | INSSMPFHNI | HPLTIGECPK | YVKSNRLVLA | TGLRNSPQEE | RRRKKRGLFG | AIAGFIEGGW |
| 1553-15/A1 | INSSMPFHNI | HPLTIGECPK | YVKSNRLVLA | TGLRNSPQGE | RRRKKRGLFG | AIAGFIEGGW |
| 2095-50/A1 | INSSMPFHNI | HPLTIGECPK | YVKSNRLVLA | TGLRNSPQGE | RRRKKRGLFG | AIAGFIEGGW |
| 3982-2/A1 | INSSMPFHNI | HPLTIGECPK | YVKSNRLVLA | TGLRNSPHGE | RRRKKRGLFG | AIAGFIEGGW |
| 3982-5/A1 | INSSMPFHNI | HPLTIGECPK | YVKSNRLVLA | TGLRNSPQGE | RRRKKRGLFG | AIAGFIEGGW |
| 3982-7/A1 | INSSMPFHNI | HPLTIGECPK | YVKSNRLVLA | TGLRNSPQGE | RRRKKRGLFG | AIAGFIEGGW |
| 3982-8/A1 | INSSMPFHNI | HPLTIGECPK | YVKSNRLVLA | TGLRNSPQGE | RRRKKRGLFG | AIAGFIEGGW |
| 3982-9/A1 | INSSMPFHNI | HPLTIGECPK | YVKSNRLVLA | TGLRNSPQGE | RRRKKRGLFG | AIAGFIEGGW |
| 3982-12/A1 | INSSMPFHNI | HPLTIGECPK | YVKSNRLVLA | TGLRNSPQGE | RRRKKRGLFG | AIAGFIEGGW |
| 3982-20/A1 | INSSMPFHNI | HPLTIGECPK | YVKSNRLVLA | TGLRNSPQGE | RRRKKRGLFG | AIAGFIEGGW |
| 3982-44/A1 | INSSMPFHNI | HPLTIGECPK | YVKSNRLVLA | TGLRNSPQGE | RRRKKRGLFG | AIAGFIEGGW |
| 1553-2/B1 | INTSMPFHNI | HPLTIGECPK | YVKSNRLVLA | TGLRNSPQGE | GRRKKRGLFG | AIAGFIEGGW |
| 1553-6/B1 | INSSMPFHNI | HPLTIGECPK | YVKSNRLVLA | TGLRNSPQGE | GRRKKRGLFG | AIAGFIEGGW |
| 1553-13/B2 | INSSMPFHNI | HPLTIGECPK | YVKSNRLVLA | TGLRNSPQGE | GRRKKRGLFG | AIAGFIEGGW |
| 1553-26/B2 | INSSMPFHNI | HPLTIGECPK | YVKSNRLVLA | TGLRNSPQGE | GRRKKRGLFG | AIAGFIEGGW |
| 1553-28/B1 | INSSMPFHNI | HPLTIGECPK | YVKSNRLVLA | TGLRNSPQGE | GRRKKRGLFG | AIAGFIEGGW |
| 2095-39/B2 | INSSMPFHNI | HPLTIGECPK | YVKSNRLVLA | TGLRNSPQGE | GRRKKRGLFG | AIAGFIEGGW |
| 2095-46/B1 | INSSMPFHNI | HPLTIGECPK | YVKSNRLVLA | TGLRNSPQGE | GRRKKRGLFG | AIAGFIEGGW |
| 2095-49/B1 | INSSMPFHNI | HPLTIGECPK | YVKSNRLVLA | TGLRNSPQGE | GRRKKRGLFG | AIAGFIEGGW |
| 2095-65/B1 | INSSMPFHNI | HPLTIGECPK | YVKSNRLVLA | TGLRNSPQGE | GRRKKRGLFG | AIAGFIEGGW |
| 2095-68/B2 | INSSMPFHNI | HPLTIGECPK | YVKSNRLVLA | TGLRNSPQGE | GRRKKRGLFG | AIAGFIEGGW |
| 2095-70/B2 | INSSMPFHNI | HPLTIGECPK | YVKSNRLVLA | TGLRNSPQGE | GRRKKRGLFG | AIAGFIEGGW |
| 2095-73/B2 | INSSMPFHNI | HPLTIGECPK | YVKSNRLVLA | TGLRNSPQGE | GRRKKRGLFG | AIAGFIEGGW |
| 2095-75/B2 | INSSMPFHNI | HPLTIGECPK | YVKSNRLVLA | TXLRNSPQGE | GRRKKRGLFG | AIAGFIEGGW |
| 3982-3/B1 | INSSMPFHNI | HPLTIGECPK | YVKSNRLVLA | TGLRNSPQGE | GRRKKRGLFG | AIAGFIEGGW |
| 3982-4/B1 | INSSMPFHNI | HPLTIGECPK | YVKSNRLVLA | TGLRNSPQGE | GRRKKRGLFG | AIAGFIEGGW |
| 3982-13/B1 | INSSMPFHNI | HPLTIGECPK | YVKSNRLVLA | TGLRNSPQGE | GRRKKRGLFG | AIAGFIEGGW |
| 3982-14/B2 | INSSMPFHNI | HPLTIGECPK | YVKSNRLVLA | TGLRNSPQEE | GRRKKRGLFG | AIAGFIEGGW |
| 3982-19/B3 | INSSMPFHNI | HPLTIGECPK | YVKSNRLVLA | TGLRNSPQGE | RRRKKRGLFG | AIAGFIEGGW |
| 3982-21/B2 | INSSMPFHNI | HPLTIGECPK | YVKSNRLVLA | TGLRNSPQGE | GRRKKRGLFG | AIAGFIEGGW |
| 3982-43/B1 | INTSMPFHNI | HPLTIGECPK | YVKSNRLVLA | TGLRNSPQGE | GRRKKRGLFG | AIAGFIEGGW |
| 3982-50/B1 | INSSMPFHNI | HPLTIGECPK | YVXSNRLVLA | TGLRNSPQGE | GRRKKRGLFG | AIAGFIEGGW |
| 3982-52/B1 | INTSMPFHNI | HPLTIGECPK | YVKSNRLVLA | TGLRNSPQGE | GRRKKRGLFG | AIAGFIEGGW |
| 3982-55/A1 | INSSMPFHNI | HPLTIGECPK | YVKSNRLVLA | TGLRNSPQGE | RRRKKRGLFG | AIAGFIEGGW |
| 3982-56/A1 | INSSMPFHNI | HPLTIGECPK | YVKSNRLVLA | TGLRNSPQGE | RRRKKRGLFG | AIAGFIEGGW |
| 3982-78/B2 | INSSMPFHNI | HPLTIGECPK | YVKSNRLVLA | TGLRNSPQGE | GRRKKRGLFG | AIAGFIEGGW |
| 4794-17/B | INSSMPFHNI | HPLTIGECPK | YVKSNRLVLA | TGLRNSPQGE | GRRKKRGLFG | AIAGFIEGGW |
| 4794-18/B | INSSMPFHNI | HPLTIGECPK | YVKSNRLVLA | TGLRNSPQGE | GRRKKRGLFG | AIAGFIEGGW |
| | ....\|....\| | ....\|....\| | ....\|....\| | ....\|....\| | ....\|....\| | ....\|....\| |
| | 365 | 375 | 385 | 395 | 405 | 415 |
| 1553-1/A1 | QGMVDGWYGY | HHSNEQGSGY | AADKESTQKA | IDGVTNKVNS | IIDKMNTQFE | AVGREFNNLE |
| 1553-15/A1 | QGMVDGWYGY | HHSNEQGSGY | AADKESTQKA | IDGVTNKVNS | IIDKMNTQFE | AVGREFNNLE |
| 2095-50/A1 | QGMVDGWYGY | HHSNEQGSGY | AADKESTQKA | IDGVTNKVNS | IIDKMNTQFE | AVGREFNNLE |
| 3982-2/A1 | QGMVDGWYGY | HHSNEQGSGY | AADKESTQKA | IDGVTNKVNS | IIDKMNTQFE | AVGREFNNLE |
| 3982-5/A1 | QGMVDGWYGY | HHSNEQGSGY | AADKESTQKA | IDGVTNKVNS | IIDKMNTQFE | AVGREFNNLE |
| 3982-7/A1 | QGMVDGWYGY | HHSNEQGSGY | AADKESTQKA | IDGVTNKVNS | IIDKMNTQFE | AVGREFNNLE |
| 3982-8/A1 | QGMVDGWYGY | HHSNEQGSGY | AADKESTQKA | IDGVTNKVNS | IIDKMNTQFE | AVGREFNNLE |
| 3982-9/A1 | QGMVDGWYGY | HHSNEQGSGY | AADKESTQKA | IDGVTNKVNS | IIDKMNTQFE | AVGREFNNLE |
| 3982-12/A1 | QGMVDGWYGY | HHSNEQGSGY | AADKESTQKA | IDGVTNKVNS | IIDKMNTQFE | AVGREFNNLE |
| 3982-20/A1 | QGMVDGWYGY | HHSNEQGSGY | AADKESTQKA | IDGVTNKVNS | IIDKMNTQFE | AVGREFNNLE |
| 3982-44/A1 | QGMVDGWYGY | HHSNEQGSGY | AADKESTQKA | IDGVTNKVNS | IIDKMNTQFE | AVGREFNNLE |
| 1553-2/B1 | QGMVDGWYGY | HHSNEQGSGY | AADKESTQKA | IDGVTNKVNS | IIDKMNTQFE | AVGREFNNLE |
| 1553-6/B1 | QGMVDGWYGY | HHSNXQGSGY | AADRESTQKA | IDGVTNKVNS | IIDKMNTQFE | AVGREFNNLE |
| 1553-13/B2 | QGMVDGWYGY | HHSNEQGSGY | AADKESTQKA | IDGVTNKVNS | IIDKMNTQFE | AVGREFNNLE |
| 1553-26/B2 | QGMVDGWYGY | HHSNEQGSGY | AADKESTQKA | IDGVTNKVNS | IIDKMNTQFE | AVGREFNNLE |
| 1553-28/B1 | QGMVDGWYGY | HHSNEQGTGY | AADKESTQKA | IDGVTNKVNS | IIDKMNTQFE | AVGREFNNLE |
| 2095-39/B2 | QGMVDGWYGY | HHSNEQGSGY | AADKESTQKA | IDGVTNKVNS | IIDKMNTQFE | AVGREFNNLE |
| 2095-46/B1 | QGMVDGWYGY | HHSNEQGTGY | AADKESTQKA | IDGVTNKVNS | IIDKMNTQFE | AVGREFNNLE |
| 2095-49/B1 | QGMVDGWYGY | HHSNEQGTGY | AADKESTQKA | IDGVTNKVNS | IIDKMNTQFE | AVGREFNNLE |
| 2095-65/B1 | QGMVDGWYGY | HHSNEQGTGY | AADKESTQKA | IDGVTNKVNS | IIDKMNTQFE | AVGREFNNLE |
| 2095-68/B2 | QGMVDGWYGY | HHSNEQGSGY | AADKESTQKA | IDGVTNKVNS | IIDKMNTQFE | AVGREFNNLE |
| 2095-70/B2 | QGMVDGWYGY | HHSNEQGSGY | AADKESTQKA | IDGVTNKVNS | IIDKMNTQFE | AVGREFNNLE |
| 2095-73/B2 | QGMVDGWYGY | HHSNEQGSGY | AADKESTQKA | IDGVTNKVNS | IIDKMNTQFE | AVGREFNNLE |
| 2095-75/B2 | QGMVDGWYGY | HHSNEQGSGY | AADKESTQKA | IDGVTNKVNS | IIDKMNTQFE | AVGREFNNLE |
| 3982-3/B1 | QGMVDGWYGY | HHSNEQGTGY | AADKESTQKA | IDGVTNKVNS | IIDKMNTQFE | AVGREFNNLE |
| 3982-4/B1 | QGMVDGWYGY | HHSNEQGTGY | AADKESTQKA | IDGVTNKVNS | IIDKMNTQFE | AVGREFNNLE |
| 3982-13/B1 | QGMVDGWYGY | HHSNEQGTGY | AADKESTQKA | IDGVTNKVNS | IIDKMNTQFE | AVGREFNNLE |
| 3982-14/B2 | QGMVDGWYGY | HHSNEQGSGY | AADKESTQKA | IDGVTNKVNS | IIDKMNTQFE | AVGREFNNLE |
| 3982-19/B3 | QGMVDGWYGY | HHSNEQGSGY | AADKESTQKA | IDGVTNKVNS | IIDKMNTQFE | AVGREFNNLE |
| 3982-21/B2 | QGMVDGWYGY | HHSNEQGSGY | AADKESTQKA | IDGVTNKVNS | IIDKMNTQFE | AVGREFNNLE |
| 3982-43/B1 | QGMVDGWYGY | HHSNEQGSGY | AADKESTQKA | INGVTNKVNS | IIDKMNTQFE | AVGREFNNLE |
| 3982-50/B1 | QGMVDGWYGY | HHSNEQGSGY | AADRESTQKA | IDGVTNKVNS | IIDKMNTQFE | AVGREFNNLE |
| 3982-52/B1 | QGMVDGWYGY | HHSNEQGSGY | AADKESTQKA | IDGVTNKVNS | IIDKMNTQFE | AVGREFNNLE |
| 3982-55/A1 | QGMVDGWYGY | HHSNEQGSGY | AADKESTQKA | IDGVTNKVNS | IIDKMNTQFE | AVGREFNNLE |
| 3982-56/A1 | QGMVDGWYGY | HHSNEQGSGY | AADKESTQKA | IDGVTNKVNS | IIDKMNTQFE | AVGREFNNLE |
| 3982-78/B2 | QGMVDGWYGY | HHSNEQGSGY | AADKESTQKA | IDGVTNKVNS | IIDKMNTQFE | AVGREFNNLE |
| 4794-17/B | QGMVDGWYGY | HHSNEQGSGY | AADKESTQKA | IDGVTNKVNS | IIDKMNTQFE | AVGREFNNLE |
| 4794-18/B | QGMVDGWYGY | HHSNEQGSGY | AADKESTQKA | IDGVTNKVNS | IIDKMNTQFE | AVGREFNNLE |
| | ....\|....\| | ....\|....\| | ....\|....\| | ....\|....\| | ....\|....\| | ....\|....\| |
| | 425 | 435 | 445 | 455 | 465 | 475 |
| 1553-1/A1 | RRIENLNKKM | EDGFLDVWTY | NAELLVLMEN | ERTLDFHDSN | VKNLYDKVRL | QLRDNAKELG |
| 1553-15/A1 | RRIENLNKKM | EDGFLDVWTY | NAELLVLMEN | ERTLDFHDSN | VKNLYDRVRL | QLRDNAKELG |
| 2095-50/A1 | RRIENLNKKM | EDGFLDVWTY | NAELLVLMEN | ERTLDFHDSN | VKNLYDKVRL | QLRDNAKELG |
| 3982-2/A1 | RRIENLNKKM | EDGFLDVWTY | NAELLVLMEN | ERTLDFHDSN | VKNLYDKVRL | QLRDNAKELG |
| 3982-5/A1 | RRIENLNKKM | EDGFLDVWTY | NAELLVLMEN | ERTLDFHDSN | VKNLYDKVRL | QLRDNAKELG |
| 3982-7/A1 | RRIENLNKKM | EDGFLDVWTY | NAELLVLMEN | ERTLDFHDSN | VKNLYDKVRL | QLRDNAKELG |
| 3982-8/A1 | RRIENLNKKM | EDGFLDVWTY | NAELLVLMEN | ERTLDFHDSN | VKNLYDKVRL | QLRDNAKELG |
| 3982-9/A1 | RRIENLNKKM | EDGFLDVWTY | NAELLVLMEN | ERTLDFHDSN | VKNLYDKVRL | QLRDNAKELG |
| 3982-12/A1 | RRIENLNKKM | EDGFLDVWTY | NAELLVLMEN | ERTLDFHDSN | VKNLYDKVRL | QLRDNAKELG |
| 3982-20/A1 | RRIENLNKKM | EDGFLDVWTY | NAELLVLMEN | ERTLDFHDSN | VKNLYDKVRL | QLRDNAKELG |
| 3982-44/A1 | RRIENLNKKM | EDGFLDVWTY | NAELLVLMEN | ERTLDFHDSN | VKNLYDKVRL | QLRDNAKELG |
| 1553-2/B1 | KRIENLNKKM | EDGFLDVWTY | NAELLVLMEN | ERTLDFHDSN | VRNLYDKVRL | QLRDNAKELG |
| 1553-6/B1 | KRIENLNKKM | EDGFLDVWTY | NAELLVLMEN | ERTLDFHDSN | VKNLYDKVRL | QLRDNAKELG |
| 1553-13/B2 | KRIENLNKKM | EDGFLDVWTY | NAELLVLMEN | ERTLDFHDSN | VKNLYDKVRL | QLRDNAKELG |
| 1553-26/B2 | KRIENLNKKM | EDGFLDVWTY | NAELLVLMEN | ERTLDFHDSN | VKNLYDKVRL | QLRDNAKELG |
| 1553-28/B1 | KRIENLNKKM | EDGFLDVWTY | NAELLVLMEN | ERTLDFHDSN | VRNLYDKVRL | QLRDNAKELG |
| 2095-39/B2 | KRIENLNKKM | EDGFLDVWTY | NAELLVLMEN | ERTLDFHDSN | VKNLYDKVRL | QLRDNAKELG |
| 2095-46/B1 | KRIENLNKKM | EDGFLDVWTY | NAELLVLMEN | ERTLDFHDSN | VRNLYDKVRL | QLRDNAKELG |
| 2095-49/B1 | KRIENLNKKM | EDGFLDVWTY | NAELLVLMEN | ERTLDFHDSN | VRNLYDKVRL | QLRDNAKELG |
| 2095-65/B1 | KRIENLNKKM | EDGFLDVWTY | NAELLVLMEN | ERTLDFHDSN | VRNLYDKVRL | QLRDNAKELG |
| 2095-68/B2 | KRIENLNKKM | EDGFLDVWTY | NAELLVLMEN | ERTLDFHDSN | VKNLYDKVRL | QLRDNAKELG |
| 2095-70/B2 | KRIENLNKKM | EDGFLDVWTY | NAELLVLMEN | ERTLDFHDSN | VKNLYDKVRL | QLRDNAKELG |
| 2095-73/B2 | KRIENLNKKM | EDGFLDVWTY | NAELLVLMEN | ERTLDFHDSN | VKNLYDKVRL | QLRDNAKELG |
| 2095-75/B2 | KRIENLNKKM | EDGFLDVWTY | NAELLVLMEN | ERTLDFHDSN | VKNLYDKVRL | QLRDNAKELG |
| 3982-3/B1 | KRIENLNKKM | EDGFLDVWTY | NAELLVLMEN | ERTLDFHDSN | VRNLYDKVRL | QLRDNAKELG |
| 3982-4/B1 | KRIENLNKKM | EDGFLDVWTY | NAELLVLMEN | ERTLDFHDSN | VRNLYDKVRL | QLRDNAKELG |
| 3982-13/B1 | KRIENLNKKM | EDGFLDVWTY | NAELLVLMEN | ERTLDFHDSN | VRNLYDKVRL | QLRDNAKELG |
| 3982-14/B2 | KRIENLNKKM | EDGFLDVWTY | NAELLVLMEN | ERTLDFHDSN | VKNLYDKVRL | QLRDNAKELG |
| 3982-19/B3 | RRIENLNKKM | EDGFLDVWTY | NAELLVLMEN | ERTLDFHDSN | VKNLYDKVRL | QLRDNAKELG |
| 3982-21/B2 | KRIENLNKKM | EDGFLDVWTY | NAELLVLMEN | ERTLDFHDSN | VKNLYDKVRL | QLRDNAKELG |
| 3982-43/B1 | KRIENLNKKM | EDGFLDVWTY | NAELLVLMEN | ERTLDFHDSN | VRNLYDKVRL | QLRDNAKELG |
| 3982-50/B1 | KRIENLNKKM | EDGFLDVWTY | NAELLVLMEN | ERTLDFHDSN | VKNLYDKVRL | QLRDNAKELG |
| 3982-52/B1 | KRIENLNKKM | EDGFLDVWTY | NAELLVLMEN | ERTLDFHDSN | VRNLYDKVRL | QLRDNAKELG |
| 3982-55/A1 | RRIENLNKKM | EDGFLDVWTY | NAELLVLMEN | ERTLDFHDSN | VKNLYDKVRL | QLRDNAKELG |
| 3982-56/A1 | RRIENLNKKM | EDGFLDVWTY | NAELLVLMEN | ERTLDFHDSN | VKNLYDKVRL | QLRDNAKELG |
| 3982-78/B2 | KRIENLNKKM | EDGFLDVWTY | NAELLVLMEN | ERTLDFHDSN | VKNLYDKVRL | QLRDNAKELG |
| 4794-17/B | KRIENLNKKM | EDGFLDVWTY | NAELLVLMEN | ERTLDFHDSN | VKNLYDKVRL | QLRDNAKELG |
| 4794-18/B | KRIENLNKKM | EDGFLDVWTY | NAELLVLMEN | ERTLDFHDSN | VKNLYDKVRL | QLRDNAKELG |
| | ....\|....\| | ....\|....\| | ....\|....\| | ....\|....\| | ....\|....\| | ....\|....\| |
| | 485 | 495 | 505 | 515 | 525 | 535 |
| 1553-1/A1 | NGCFEFYHRC | DNECMESVRN | GTYDYPQYSE | EARLKREEIS | GVKLESIGTY | QILSIYSTVA |
| 1553-15/A1 | NGCFEFYHRC | DNECMESVRN | GTYDYPQYSE | EARLKREEIS | GVKLESIGTY | QILSIYSTVA |
| 2095-50/A1 | NGCFEFYHRC | DNECMESVRN | GTYDYPQYSE | EARLKREEIS | GVKLESIGTY | QILSIYSTVA |
| 3982-2/A1 | NGCFEFYHRC | DNECMESVRN | GTYDYPQYSE | EARLKREEIS | GVKLESIGTY | QILSIYSTVA |
| 3982-5/A1 | NGCFEFYHRC | DNECMESVRN | GTYDYPQYSE | EARLKREEIS | GVKLESIGTY | QILSIYSTVA |
| 3982-7/A1 | NGCFEFYHRC | DNECMESVRN | GTYDYPQYSE | EARLKREEIS | GVKLESIGTY | QILSIYSTVA |
| 3982-8/A1 | NGCFEFYHRC | DNECMESVRN | GTYDYPQYSE | EARLKREEIS | GVKLESIGTY | QILSIYSTVA |
| 3982-9/A1 | NGCFEFYHRC | DNECMESVRN | GTYDYPQYSE | EARLKREEIS | GVKLESIGTY | QIL------- |
| 3982-12/A1 | NGCFEFYHRC | DNECMESVRN | GTYDYPQYSE | EARLKREEIS | GVKLESIGTY | QILSIYSTVA |
| 3982-20/A1 | NGCFEFYHRC | DNECMESVRN | GTYDYPQYSE | EARLKREEIS | GVKLESIGTY | QILSIYX--- |
| 3982-44/A1 | NGCFEFYHRC | DNECMESVRN | GTYDYPQYSE | EARLKREEIS | GVKLESIGTY | QILSIYSTVA |
| 1553-2/B1 | NGCFEFYHRC | DNECMESVRN | GTYDYPQYSE | EARLKREEIS | GVKLESIGTY | QILSIYSTVA |
| 1553-6/B1 | NGCFEFYHRC | DNECIESVRN | GTYDYPQYSE | EARLKREEIS | GVKLESIGTY | QILSIYSTVA |
| 1553-13/B2 | NGCFEFYHRC | DNECMESVRN | GTYDYPQYSE | EARLKREEIS | GVKLESIGTY | QILSIYSTVA |
| 1553-26/B2 | NGCFEFYHRC | DNECMESVRN | GTYDYPQYSE | EARLKREEIS | GVKLESIGTY | QILSIYSTVA |
| 1553-28/B1 | NGCFEFYHKC | DNECMESVRN | GTYDYPQYSK | EARLKREEIS | GVKLESIGTY | QILSIYSTVT |
| 2095-39/B2 | NGCFEFYHRC | DNECMESVRN | GTYDYPQYSE | EARLKREEIS | GVKLESIGTY | QILSIYSTVA |
| 2095-46/B1 | NGCFEFYHKC | DNECMESVRN | GTYDYPQYSK | EARLKREEIS | GVKLESIGTY | QILSIYSTVA |
| 2095-49/B1 | NGCFEFYHKC | DNECMESVRN | GTYDYPQYSK | EARLKREEIS | GVKLESIGTY | QILSIYSTVA |
| 2095-65/B1 | NGCFEFYHKC | DNECMESVRN | GTYDYPQYSK | EARLKREEIS | GVKLESIGTY | QILSIYSTVA |
| 2095-68/B2 | NGCFEFYHRC | DNECMESVRN | GTYDYPQYSE | EARLNREEIS | GVKLESIGTY | QILSIYSTVA |
| 2095-70/B2 | NGCFEFYHRC | DNECMESVRN | GTYDYPQYSE | EARLKREEIS | GVKLESIGTY | QILSIYSTVA |
| 2095-73/B2 | NGCFEFYHRC | DNECMESVRN | GTYDYPQYSE | EARLKREEIS | GVKLESIGTY | QILSIYSTVA |
| 2095-75/B2 | NGCFEFYHRC | DNECMESVRN | GTYDYPQYSE | EARLKREEIS | GVKLESIGTY | QILSIYSTVA |
| 3982-3/B1 | NGCFEFYHKC | DNECMESVRN | GTYDYPQYSK | EARLKREEIS | GVKLESIGTY | QILSIYSTVA |
| 3982-4/B1 | NGCFEFYHKC | DNECMESVRN | GTYDYPQYSK | EARLKREEIS | GVKLESIGTY | QILSIYSTVA |
| 3982-13/B1 | NGCFEFYHKC | DNECMESVRN | GTYDYPQYSK | EARLKREEIS | GVKLESIGTY | QILSIYSTVA |
| 3982-14/B2 | NGCFEFYHRC | DNECMESVRN | GTYDYPQYSE | EARLKREEIS | GVKLESIGTY | QILSIYSTVA |
| 3982-19/B3 | NGCFEFYHRC | DNECMESVRN | GTYDYPQYSE | EARLKREEIS | GAKLESIGTY | QIX------- |
| 3982-21/B2 | NGCFEFYHRC | DNECMESVKN | GTYDYPQYSE | EARLKREEIS | GVKLESIGTY | QILSIYSTVA |
| 3982-43/B1 | NGCFEFYHRC | DNECMESVRN | GTYDYPQYSK | EARLKREEIS | GVKLESIGTY | QILSIYSTVA |
| 3982-50/B1 | NGCFEFYHRC | DNECIESVRN | GTYDYPQYSE | EARLKREEIS | GVKLESIGTY | QILSIYSTVA |
| 3982-52/B1 | NGCFEFYHRC | DNECMESVRN | GTYDYPQYSE | EARLKREEIS | GVKLEX---- | ---------- |
| 3982-55/A1 | NGCFEFYHRC | DNECMESVRN | GTYDYPQYSE | EARLKREEIS | GVKLESIGTX | QI-------- |
| 3982-56/A1 | NGCFEFYHRC | DNECMESVRN | GTYDYPQYSE | EARLKREEIS | GVKLESIGTX | QIX------- |
| 3982-78/B2 | NGCFEFYHRC | DNECMESVRN | GTYDYPQYSE | EARLKREEIS | GVKLESIGTY | QIL*IYSTVA |
| 4794-17/B | NGCFEFYHRC | DNECMESVRN | GTYDYPQYSE | EARLKREEIS | GVKLESIGTY | QILSIYSTVA |
| 4794-18/B | NGCFEFYHRC | DNECMESVRN | GTYDYPQYSE | EARLKREEIS | GVKLESIGTY | QILSIYSTVA |
| | ....\|....\| | ....\|....\| | ....\|.... | | | |
| | 545 | 555 | 565 | | | |
| 1553-1/A1 | SSLALAIMVA | GLFLWMCSNG | SLQCRICI* | | | |
| 1553-15/A1 | SSLALAIMVA | GLFLWMCSNG | SLQCRICI* | | | |
| 2095-50/A1 | SSLALAIMVA | GLFLWMCSNG | X-------- | | | |
| 3982-2/A1 | SSLALAIMVX | ---------- | --------- | | | |
| 3982-5/A1 | SSLALAIM-- | ---------- | --------- | | | |
| 3982-7/A1 | SSLALAIMVA | GLFLWMCSNG | X-------- | | | |
| 3982-8/A1 | SSLALAIMVX | ---------- | --------- | | | |
| 3982-9/A1 | ---------- | ---------- | --------- | | | |
| 3982-12/A1 | SSLALAIX-- | ---------- | --------- | | | |
| 3982-20/A1 | ---------- | ---------- | --------- | | | |
| 3982-44/A1 | SSLALAIX-- | ---------- | --------- | | | |
| 1553-2/B1 | SSLALAIMVA | GLFLWMCSNG | SLQCRICI* | | | |
| 1553-6/B1 | SSLALAIIVA | GLFLWMCSNG | SLQCRICI* | | | |
| 1553-13/B2 | SSLALAIMMA | GLFLWMCSNG | SLQCRICI* | | | |
| 1553-26/B2 | SSLALAIMMA | GLFLWMCSNG | SLQCRICI* | | | |
| 1553-28/B1 | SSLALAIMVA | GLSLWMCSNG | SLQCRICI* | | | |
| 2095-39/B2 | SSLALAIMMA | GLFLWX---- | --------- | | | |
| 2095-46/B1 | SSLALAIMVA | GLSLWMCSX- | --------- | | | |
| 2095-49/B1 | SSLALAIMVA | GLSLWMCSNG | SLQCRICI- | | | |
| 2095-65/B1 | SSLALAIMVA | GLSLWM---- | --------- | | | |
| 2095-68/B2 | SSLALAIMMA | GLFLWMCSNG | X-------- | | | |
| 2095-70/B2 | GSLALAIMMA | GLFLWMCSNG | SLQ------ | | | |
| 2095-73/B2 | SSLALAIMVX | ---------- | --------- | | | |
| 2095-75/B2 | GSLALAIMVX | ---------- | --------- | | | |
| 3982-3/B1 | SSLALAIMVA | GLSLWMCSNG | SLQ------ | | | |
| 3982-4/B1 | SSLALAIMVA | GLSLWMCSNG | SLQCRX--- | | | |
| 3982-13/B1 | SSLALAIMVA | X--------- | --------- | | | |
| 3982-14/B2 | SSLALAIMVA | GLFLWMCSNG | SLQCRICI* | | | |
| 3982-19/B3 | ---------- | ---------- | --------- | | | |
| 3982-21/B2 | SSLALAIM-- | ---------- | --------- | | | |
| 3982-43/B1 | SSLALAIM-- | ---------- | --------- | | | |
| 3982-50/B1 | SSLALAIM-- | ---------- | --------- | | | |
| 3982-52/B1 | ---------- | ---------- | --------- | | | |
| 3982-55/A1 | ---------- | ---------- | --------- | | | |
| 3982-56/A1 | ---------- | ---------- | --------- | | | |
| 3982-78/B2 | SSLALAX--- | ---------- | --------- | | | |
| 4794-17/B | SSLALAI--- | ---------- | --------- | | | |
| 4794-18/B | SSLALAIMMA | GLFLWMCSNG | X-------- | | | |

TABLE B
The following shows SEQ ID NOs: 62 to 99, which correspond to the
variant sequences as set forth in SEQ ID NOs: 9 to 46 starting with
the N-terminal amino acid D17, wherein the numbering of said first
N-terminal amino acid position (D17) refers to the amino acid
position 17 as exemplarily given in SEQ ID NO 8:

| ....\|....\| | ....\|....\| | ....\|....\| | ....\|....\| | ....\|....\| | ....\|....\| | |
|---|---|---|---|---|---|---|
| | 5 | 15 | 25 | 35 | 45 | 55 |
| 1553-1/A1 | (SEQ ID NO: 62) | DQIC | IGYHANNSTE | QVDTIMEKNV | TVTHAQDILE | KTHNGKLCNL |
| 1553-15/A1 | (SEQ ID NO: 63) | DQIC | IGYHANNSTE | QVDTIMEKNV | TVTHAQDILE | KTHNGKLCNL |
| 2095-50/A1 | (SEQ ID NO: 64) | DQIC | IGYHANNSTE | QVDTIMEKNV | TVTHAQDILE | KTHNGKLCNL |
| 3982-2/A1 | (SEQ ID NO: 65) | DQIC | IGYHANNSTE | QVDTIMEKNV | TVTHAQDILE | KTHNGKLCNL |
| 3982-5/A1 | (SEQ ID NO: 66) | DQIC | IGYHANNSTE | QVDTIMEKNV | TVTHAQDILE | KTHNGKLCNL |
| 3982-7/A1 | (SEQ ID NO: 67) | DQIC | IGYHANNSTE | QVDTIMEKNV | TVTHAQDILE | KTHNGKLCNL |
| 3982-8/A1 | (SEQ ID NO: 68) | DQIC | IGYHANNSTE | QVDTIMEKNV | TVTHAQDILE | KTHNGKLCNL |
| 3982-9/A1 | (SEQ ID NO: 69) | DQIC | IGYHANNSTE | QVDTIMEKNV | TVTHAQDILE | KTHNGKLCNL |
| 3982-12/A1 | (SEQ ID NO: 70) | DQIC | IGYHANNSTE | QVDTIMEKNV | TVTHAQDILE | KTHNGKLCNL |
| 3982-20/A1 | (SEQ ID NO: 71) | DQIC | IGYHANNSTE | QVDTIMEKNV | TVTHAQDILE | KTHNGKLCNL |
| 3982-44/A1 | (SEQ ID NO: 72) | DQIC | IGYHANNSTE | QVDTIMEKNV | TVTHAQDILE | KTHNGKLCNL |
| 1553-2/B1 | (SEQ ID NO: 73) | DQIC | IGYHANNSTE | QVDTIMEKNV | TVTHAQDILE | KTHNGKLCDL |
| 1553-6/B1 | (SEQ ID NO: 74) | DQIC | IGYHANNSTE | QVDTIMEKNV | TVTHAQDILE | KTHNGKLCDL |
| 1553-13/B2 | (SEQ ID NO: 75) | DQIC | IGYHANNSTE | QVDTIMEKNV | TVTHAQDILE | KTHNGKLCDL |
| 1553-26/B2 | (SEQ ID NO: 76) | DQIC | IGYHANNSTE | QVDTIMEKNV | TVTHAQDILE | KTHNGKLCDL |
| 1553-28/B1 | (SEQ ID NO: 77) | DQIC | IGYHANNSTE | QVDTIMEKNV | TVTHAQDILE | KTHNGKLCDL |
| 2095-39/B2 | (SEQ ID NO: 78) | DQIC | IGYHANNSTE | QVDTIMEKNV | TVTHAQDILE | KTHNGKLCDL |
| 2095-46/B1 | (SEQ ID NO: 79) | DQIC | IGYHANNSTE | QVDTIMEKNV | TVTHAQDILE | KTHNGKLCDL |
| 2095-49/B1 | (SEQ ID NO: 80) | DQIC | IGYHANNSTE | QVDTIMEKNV | TVTHAQDILE | KTHNGKLCDL |
| 2095-65/B1 | (SEQ ID NO: 81) | DQIC | IGYHANNSTE | QVDTIMEKNV | TVTHAQDILE | KTHNGKLCDL |
| 2095-68/B2 | (SEQ ID NO: 82) | DQIC | IGYHANNSTE | QVDTIMEKNV | TVTHAQDILE | KTHNGKLCDL |
| 2095-70/B2 | (SEQ ID NO: 83) | DQIC | IGYHANNSTE | QVDTIMEKNV | TVTHAQDILE | KTHNGKLCDL |
| 2095-73/B2 | (SEQ ID NO: 84) | DQIC | IGYHANNSTE | QVDTIMEKNV | TVTHAQDILE | KTHNGKLCDL |
| 2095-75/B2 | (SEQ ID NO: 85) | DQIC | IGYHANNSTE | QVDTIMEKNV | TVTHAQDILE | KTHNGKLCDL |
| 3982-3/B1 | (SEQ ID NO: 86) | DQIC | IGYHANNSTE | QVDTIMEKNV | TVTHAQDILE | KTHNGKLCDL |
| 3982-4/B1 | (SEQ ID NO: 87) | DQIC | IGYHANNSTE | QVDTIMEKNV | TVTHAQDILE | KTHNGKLCDL |
| 3982-13/B1 | (SEQ ID NO: 88) | DQIC | IGYHANNSTE | QVDTIMEKNV | TVTHAQDILE | KTHNGKLCDL |
| 3982-14/B2 | (SEQ ID NO: 89) | DQIC | IGYHANNSTE | QVDTIMEKNV | TVTHAQDILE | KTHNGKLCDL |
| 3982-19/B3 | (SEQ ID NO: 90) | DQIC | IGXHANNSTE | QVDTIMEKNI | TVTHAQDILE | KTHNGKLCDL |
| 3982-21/B2 | (SEQ ID NO: 91) | DQIC | IGYHANNSTE | QVDTIMEKNV | TVTHAQDILE | KTHNGKLCDL |
| 3982-43/B1 | (SEQ ID NO: 92) | DQIC | IGYHANNSTE | QVDTIMEKNV | TVTHAQDILE | KTHNGKLCDL |
| 3982-50/B1 | (SEQ ID NO: 93) | DQIC | IGYHANNSTE | QVDTIMEKNV | TVTHAQDILE | KTHNGKLCDL |
| 3982-52/B1 | (SEQ ID NO: 94) | DQIC | IGYHANNSTE | QVDTIMEKNV | TVTHAQDILE | KTHNGKLCDL |
| 3982-55/A1 | (SEQ ID NO: 95) | DQIC | IGYHANNSTE | QVDTIMEKNV | TVTHAQDILE | KTHNGKLCNL |
| 3982-56/A1 | (SEQ ID NO: 96) | DQIC | IGXHANNSTE | QVDTIMEKNV | TVTHAQDILE | KTHNGKLCNL |
| 3982-78/B2 | (SEQ ID NO: 97) | DQIC | IGYHANNSTE | QVDTIMEKNV | TVTHAQDILE | KTHNGKLCDL |
| 4794-17/B | (SEQ ID NO: 98) | DQIC | IGYHANNSTE | QVDTIMEKNV | TVTHAQDILE | KTHNGKLCDL |
| 4794-18/B | (SEQ ID NO: 99) | DQIC | IGYHANNSTE | QVDTIMEKNV | TVTHAQDILE | KTHNGKLCDL |
| | ....\|....\| | ....\|....\| | ....\|....\| | ....\|....\| | ....\|....\| | ....\|....\| |
| | 65 | 75 | 85 | 95 | 105 | 115 |
| 1553-1/A1 | DGVKPLILRD | CSVAGWLLGN | PMCDEFLNVP | EWSYIVEKIN | PANDLCYPGK | FNDYEELKHL |
| 1553-15/A1 | DGVKPLILRD | CSVAGWLLGN | PMCDEFLNVP | EWSYIVEKIN | PANDLCYPGN | FNDYEELKHL |
| 2095-50/A1 | DGVKPLILRD | CSVAGWLLGN | PMCDEFLNVP | EWSYIVEKIY | PANDLCYPGN | FNDYEELKHL |
| 3982-2/A1 | DGVKPLILRD | CSVAGWLLGN | PMCDEFLDVP | EWSYIVEKIN | PANDLCYPGN | FNDYEELKHL |
| 3982-5/A1 | DGVKPLILRD | CSVAGWLLGN | PMCDEFLNV- | EWSYIVEKIN | PTNDLCYPGN | FNDYEELKHL |
| 3982-7/A1 | DGVKPLILRD | CSVAGWLLGN | PMCDKFLNVP | EWSYIVEKIN | PTNDLCYPGN | FNDYEELKHL |
| 3982-8/A1 | DGVKPLILRD | CSVAGWLLGN | PMCDEFLNVP | EWSYIVEKIN | PTNDLCYPGN | FNDYEELKHL |
| 3982-9/A1 | DGVKPLILRD | CSVAGWLLGN | PMCDEFLNVP | EWSYIVEKIN | PANDLCYPGN | FNDYEELKHL |
| 3982-12/A1 | DGVKPLILRD | CSVAGWLLGN | PMCDEFLNVP | EWSYIVEKIN | PANDLCYPGN | FNDYEELKHL |
| 3982-20/A1 | DGVKPLILRD | CSVAGWLLGN | PMCDEFLNVP | EWSYIVEKIN | PANDLCYPGN | FNDYEELKHL |
| 3982-44/A1 | DGVKPLILRD | CSVAGWLLGN | PMCDEFLNVP | EWSYIVEKIN | PANDLCYPGN | FNDYEELKHL |
| 1553-2/B1 | GGVKPLILRD | CSVAGWLLGN | PMCDEFPNVS | EWSYIVEKIN | PANDLCYPGN | FNNYEELKHL |
| 1553-6/B1 | DGVKPLILRD | CSVAGWLLGN | PMCDEFPNVS | EWSYIVEKTN | PANDLCYPGN | FNNYEELKHL |
| 1553-13/B2 | DGVKPLILRD | CSVAGWLLGN | PMCDEFPNVS | EWSYIVEKIN | PANDLCYPGN | FNNYEELKHL |
| 1553-26/B2 | DGVKPLILRD | CSVAGWLLGN | PMCDEFPNVS | EWSYIVEKIN | PANDLCYPGN | FNNYEELKHL |
| 1553-28/B1 | DGVKPLILRD | CSVAGWLLGN | PMCDEFPNVS | EWSYIVEKIN | PANDLCYPGN | FNNYEELKHL |
| 2095-39/B2 | DGVKPLILRD | CSVAGWLLGN | PMCDEFPNVS | EWSYIVEKTN | PANDLCYPGN | FNNYEELKHL |
| 2095-46/B1 | DGVKPLILRD | CSVAGWLLGN | PMCDEFPNVS | EWSYIVEKIN | PANDLCYPGN | FNNYEELKHL |
| 2095-49/B1 | DGVKPLILRD | CSVAGWLLGN | PMCDEFPNVS | EWSYIVEKIN | PANDLCYPGN | FNNYEELKHL |
| 2095-65/B1 | DGVKPLILRG | CSVAGWLLGN | PMCDEFPNVS | EWSYIVEKIN | PANDLCYPGN | FNNYEELKHL |
| 2095-68/B2 | DGVKPLILRD | CSVAGWLLGN | PMCDEFPNVS | EWSYIVEKIN | PANDLCYPGN | FNNYEELKHL |
| 2095-70/B2 | DGVKPLILRD | CSVAGWLLGN | PMCDEFPNVS | EWSYIVEKIN | PANDLCYPGN | FNNYEELKHL |
| 2095-73/B2 | DGVKPLILRD | CSVAGWLLGN | PMCDEFPNVS | EWSYIVEKIN | PANDLCYPGN | FNNYEELKHL |
| 2095-75/B2 | DGVKPLILRD | CSVAGWLLGN | PMCDEFPNVS | EWSYIVEKIN | PANDLCYPGN | FNNYEELKHL |
| 3982-3/B1 | DGVKPLILRD | CSVAGWLLGN | PMCDEFPNVS | EWSYIVEKIN | PANDLCYPGN | FNNYEELKHL |
| 3982-4/B1 | DGVKPLILRD | CSVAGWLLGN | PMCDEFPNVS | EWSYIVEKIN | PANDLCYPGN | FNNYEELKHL |
| 3982-13/B1 | DGVKPLILRD | CSVAGWLLGN | PMCDEFPNVS | EWSYIVEKIN | PANDLCYPGN | FNNYEELKHL |
| 3982-14/B2 | DGVKPLILRD | CSVAGWLLGN | PMCDEFPNVS | EWSYIVEKIN | PANDLCYPGN | FNNYEELKHL |
| 3982-19/B3 | DGVKPLILRD | CSVAGWLLGN | PMCDEFLNVS | EWSYIVEKIN | PANDLCYPGN | FNNYEELKHL |
| 3982-21/B2 | DGVKPLILRD | CSVAGWLLGN | PMCDEFPNVS | EWSYIVEKIN | PANDLCYPGN | FNNYEELKHL |
| 3982-43/B1 | DGVKPLILRD | CSVAGWLLGN | PMCDEFPNVS | EWSYIVEKIN | PANDLCYPGN | FNNYEELKHL |
| 3982-50/B1 | DGVKPLILRD | CSVAGWLLGN | PMCDEFPNVS | EWSYIVEKTN | PANDLCYPGN | FNNYEELKHL |
| 3982-52/B1 | DGVKPLILRD | CSVAGWLLGN | PMCDEFPNVS | EWSYIVEKIN | PANDLCYPGN | FNNYEELKHL |
| 3982-55/A1 | DGVKPLILRD | CSVAGWLLGN | PMCDKFLNVP | EWSYIVEKIN | PANDLCYPGD | FNDYEELKHL |
| 3982-56/A1 | DGVKPLILRD | CSVAGWLLGN | PMCDEFPNVL | EWSYIVEKIN | PANDLCYPGN | FNDYEELKHL |
| 3982-78/B2 | DGVKPLILRD | CSVAGWLLGN | PMCDEFPNVS | EWSYIVEKIN | PANDLCYPGN | FNNYEELKHL |
| 4794-17/B | DGVKPLILRD | CSVAGWLLGN | PMCDEFPNVS | EWSYIVEKIN | PANDLCYPGN | FNNYEELKHL |
| 4794-18/B | DGVKPLILRD | CSVAGWLLGN | PMCDEFPNVS | EWSYIVEKIN | PANDLCYPGN | FNNYEELKHL |
| | ....\|....\| | ....\|....\| | ....\|....\| | ....\|....\| | ....\|....\| | ....\|....\| |
| | 125 | 135 | 145 | 155 | 165 | 175 |
| 1553-1/A1 | LSRINHFEKI | QIIPRNSWSD | HETS-GVSSA | CQYQGRSSFF | RNVVWLTKKD | NAYSTIKRSY |
| 1553-15/A1 | LSRINHFEKI | QIIPKGSWSD | HEAS-GVSSA | CPYQGRSSFF | RNVVWLTKKN | NAYPTIKKSY |
| 2095-50/A1 | LSRINHFEKI | QIIPKSSWSD | HEAS-GVSSA | CPYQGRSSFF | RNVVWLTKKD | NAYPTIKKSY |
| 3982-2/A1 | LSRINHFEKI | QIIPKNSWSD | HETS-GVSSA | CPYQGRSSFF | RNVVWLTKKN | TAYPTIKKSY |
| 3982-5/A1 | LSRINHFEKI | QIIPKNYWSD | HETS-GVSSA | CPYQGRPSFF | RNVVWLTKKN | NAYPTIKKSY |
| 3982-7/A1 | LSRINHFEKI | QIIPKNSWSD | HEAS-GVSSA | CPYQGRSSFF | RNVVWLTKKN | NAYPTIKKSY |
| 3982-8/A1 | LSRINHFEKI | QIIPKNSWSD | HEAS-GVSSA | CPYQGRSSFF | RNVVWLTKKN | NAYPTIKKSY |
| 3982-9/A1 | LSRINHFEKI | QIIPKNSWSD | HEAS-GVSSA | CPYQGRSSFF | RNVVWLTKKN | NXYPTIKKSY |
| 3982-12/A1 | LSRINHFEKI | QIIPKNSWSD | HEAS-GVSSA | CPYQGRSSFF | RNVVWLTKKN | NAYPTIKKSY |
| 3982-20/A1 | LSRINHFEKI | QIIPKNSWSD | HEAS-GVSSA | CPYQGRSSFF | RNVVWLTKKN | NAYPTIKKSY |
| 3982-44/A1 | LSRINHFEKI | QIIPKNSWSD | HEAS-GVSSA | CPYQGRSSFF | RNVVWLTKKD | NAYPTIKRSY |
| 1553-2/B1 | LSRINRFEKI | QIIPKSSWPD | HEASLGVSSA | CPYQGGPSFY | RNVVWLIKKN | DTYPTIKESY |
| 1553-6/B1 | LSRINRFEKI | KIIPKSSWPD | HEASLGVSSA | CPYQGEPSFY | RNVVWLIKKN | NTYPTIKESY |
| 1553-13/B2 | LSRINRFEKI | KIIPKSSWPD | HEASLGVSSA | CPYQRGPSFY | RNVVWLIKKN | NTYPTIKKSY |
| 1553-26/B2 | LSRINRFEKI | KIIPKSSWPD | HEASLGVSSA | CPYQGGPSFY | RNVVWLIKKN | NTYPTIKESY |
| 1553-28/B1 | LSRINRFEKI | QIIPKSSWPD | HEASLGVSSA | CPYQGEPSFY | RNVVWLIKKN | NTYPTIKESY |
| 2095-39/B2 | LSRINRFEKI | KIIPKSSWPD | HEASLGVSSA | CPYQGRPSFY | RNVVWLIKKN | NTYPTIKESY |
| 2095-46/B1 | LSRINRFEKI | QIIPKSSWPD | HEASLGVSSA | CPYQGEPSFY | RNVVWLIKKN | NTYPTIKENY |
| 2095-49/B1 | LSRINRFEKI | QIIPKSSWPD | HEASLGVSSA | CPYQGEPSFY | RNVVWLIKKN | NTYPTIKENY |
| 2095-65/B1 | LSRINRFEKI | QIIPKSSWPD | HEASLGVSSA | CPYQGEPSFY | RNVVWLIKKN | NTYPTIKESY |
| 2095-68/B2 | LSRINRFEKI | KIIPKSSWPD | HEASLGVSSA | CPYQGGPSFY | RNVVWLIKKN | NTYPTIKKSY |
| 2095-70/B2 | LSRINRFEKI | KIIPKXSWPD | HEASLGVSSA | CPYQGGPSFY | RNVVWLIKKN | NTYPTIKESY |
| 2095-73/B2 | LSRINRFEKI | KIIPKSSWPD | HEASLGVSSA | CPYQEGPSFY | RNVVWLIKKN | NTYPTIKKSY |
| 2095-75/B2 | LSRINRFEKI | KIIPKSSWPD | HEASLGVSSA | CPYQGGXSFY | RNVVWLIKKN | NTYPTIKESY |
| 3982-3/B1 | LSRINRFEKI | QIIPKSSWPD | HEASLGVSSA | CPYQGEPSFY | RNVVWLIKKN | NTYPTIKENY |
| 3982-4/B1 | LSRINRFEKI | QIIPKSSWPD | HEASLGVSSA | CPYQGEPSFY | RNVVWLIKKN | NTYPTIKESY |
| 3982-13/B1 | LSRINRFEKI | QIIPKSSWPD | HEASLGVSSA | CPYQGEPSFY | RNVVWLIKKN | NTYPTIKENY |
| 3982-14/B2 | LSRINRFEKI | KIIPKSSWPD | HEASLGVSSA | CPYQGGPSFY | RNVVWLIKKN | NTYPTIKESY |
| 3982-19/B3 | LSRINRFEKI | QIISKNSWPD | HEASLGVSAA | CPYQGGLSFY | RNVVWLIEKN | NTYPLIKKNY |
| 3982-21/B2 | LSRINRFEKI | KIIPKSSWPD | HEASLGVSSA | CPYQRGPSFY | RNVVWLIKKN | NTYPTIKKSY |
| 3982-43/B1 | LSRINRFEKI | QIIPKSSWPD | HEASLGVSSA | CPYQGGPSFY | RNVVWLIKKN | DTYPTIKESY |
| 3982-50/B1 | LSRINRFEKI | KIIPKSSWPD | HEASLGVSSA | CPYQGEPSFY | RNVVWLIKKN | NTYPTIKESY |
| 3982-52/B1 | LSRINRFEKI | QIIPKSSWPD | HEASLGVSSA | CPYQGGPSFY | RNVVWLIKKN | DTYPTIKESY |
| 3982-55/A1 | LSRINHFEKI | QIIPKNSWSD | HEAS-GVSSA | CPYQGRSSFF | RNVVWLTKKN | NAYPTIKKSY |
| 3982-56/A1 | LSRINHFEKI | QIIPKNSWSD | HEAS-GVSSA | CPYQRRSSFF | RNVVWLTKKN | NAYPTIKKSY |
| 3982-78/B2 | LSRINRFEKI | KIIPKSSWPD | HEASLGVSSA | CPYQGGPSFY | RNVVWLIKKN | NTYPTIKKSY |
| 4794-17/B | LSRINRFEKI | KIIPKSSWPD | HEASLGVSSA | CPYQGGPSFY | RNVVWLIKKN | NTYPTIKESY |
| 4794-18/B | LSRINRFEKI | KIIPKSSWPD | HEASLGVSSA | CPYQGGPSFY | RNVVWLTKKN | NTYPTIKKSY |
| | ....\|....\| | ....\|....\| | ....\|....\| | ....\|....\| | ....\|....\| | ....\|....\| |
| | 185 | 195 | 205 | 215 | 225 | 235 |
| 1553-1/A1 | NNTNQEDLLV | LWGIHHPNDA | AEQTRLYQNP | TTYISVGTST | LNQRLVPKIA | TRSKVNGQSG |
| 1553-15/A1 | NNTNQEDLLV | LWGIHHPNDA | AEQTRLYQNP | TTYISVGTST | LNQRLVPKIA | TRSKVNGQSG |
| 2095-50/A1 | NNTNQEDLLI | LWGIHHPNDA | AEQTRLYQNP | TTYISVGTST | LNQRLVPKIA | TRSKVNGQSG |
| 3982-2/A1 | NNTNQEDLLV | LWGIHHPNDA | AEQTRLYQNP | TTYISVGTST | LNQRLVPKIA | TRSKVNGQSG |
| 3982-5/A1 | NNTNQEDLLV | LWGIHHPNDA | AEQTRLYQNP | TTYISVGTST | LNQRLVPKIA | TRSKVNGQSG |
| 3982-7/A1 | NNTNQEDLLV | LWGIHHPNDA | AEQTRLYQNP | TTYISVGTST | LNQRLVPKIA | TRSKVNGQSG |
| 3982-8/A1 | NNTNQEDLLV | LWGIHHPNDA | AEQTRLYQNP | TTYISVGTST | LNQRLVPKIA | TRSKVNGQSG |
| 3982-9/A1 | NNTNQEDLLV | LWGIHHPNDA | AEQTKLYQNP | TTYISVGTST | LNQRLVPKIA | TRSKVNGQSG |
| 3982-12/A1 | NNTNQEDLLV | LWGIHHPNDE | AEQTRLYQNP | TTYISVGTST | LNQRLVPKIA | TRSKVNGQSG |
| 3982-20/A1 | NNTNQEDLLV | LWGIHHPNDA | AEQTRLYQNP | TTYISVGTST | LNQRLVPKIA | NRSKVNGQSG |
| 3982-44/A1 | NNTNQEDLLV | LWGIHHPNDA | AEQTRLYQNP | TTYISVGTST | LNQRLVPKIA | TRSKVNGQSG |
| 1553-2/B1 | HNTNQEDLLV | LWGIHHPNNE | EEQKRIYKNP | TTYVSVGTST | LNQRLVPKIA | TRSKVNGQSG |
| 1553-6/B1 | HNTNQEDLLV | LWGIHHPNDE | EEQTRIYKNP | TTYISVGTST | LNQRLVPKIA | TRSKVNGQSG |
| 1553-13/B2 | HNTNQEDLLV | LWGIHHPNDE | EEQTRIYKNP | TTYISVGTST | LNQRLVPKIA | TRSKVNGQSG |
| 1553-26/B2 | HNTNQEDLLV | LWGIHHPNDE | EEQTRIYKNP | TTYISIGTST | LNQRLVPKIA | TRSKVNGQRG |
| 1553-28/B1 | HNTNQEDLLV | LWGIHHPNDE | EEQKRIYKNP | TTYISVGTST | LNQRLVPKIA | TRPKVNGQSG |
| 2095-39/B2 | HNTNQEDLLV | LWGIHHPNDE | EEQTRIYKNP | TTYISIGTST | LNQRLIPKIA | TRSKVNGQSG |
| 2095-46/B1 | HNTNQEDLLV | LWGIHHPNDE | EEQKRIYKNP | TTYISVGTST | LNQRLVPKIA | TRPKVNGQSG |
| 2095-49/B1 | HNTNQEDLLV | LWGIHHPNDE | EEQKRIYKNP | TTYISVGTST | LNQRLVPKIA | TRPKVNGQSG |
| 2095-65/B1 | HNTNQEDLLV | LWGIHHPNDE | EEQKRIYKNP | TTYISVGTST | LNQRLVPKIA | TRPKVNGQSG |
| 2095-68/B2 | HNTNQEDLLV | LWGIHHPNDE | EEQTRIYKNP | TTYISVGTST | LNQRLVPKIA | TRSKVNGQSG |
| 2095-70/B2 | HNTNQEDLLV | LWGIHHPNDE | EEQTRIYKNP | TTYISIGTST | LNQRLVPKIA | TRSKVNGQSG |
| 2095-73/B2 | HNTNQEDLLV | LWGIHHPNDE | EEQTRIYKNP | TTYISVGTST | LNQRLVPKIA | TRSKVNGQSG |
| 2095-75/B2 | HNTNQEDLLV | LWGIHHPNDE | EEQTRIYKNP | TTYISIGTST | LNQRLVPKIA | TRSKVNGQSG |
| 3982-3/B1 | HNTNQEDLLV | LWGIHHPNDE | EEQKRIYKNP | TTYISVGTST | LTQRLVPKIA | TRPKVNGQSG |
| 3982-4/B1 | HNTNQEDLLV | LWGIHHPNDE | EEQKRIYKNP | TTYISVGTST | LNQRLVPKIA | TRPKVNGQSG |
| 3982-13/B1 | HNTNQEDLLV | LWGIHHPNDE | EEQKRIYKNP | TTYISVGTST | LNQRLVPKIA | TRPKVNGQSG |
| 3982-14/B2 | HNTNQEDLLV | LWGIHHPNDE | EEQTRIYKNP | NTYISVGTST | LNQRLVPKIA | TRSKVNGQSG |
| 3982-19/B3 | HNTNQEDLLV | LWGIHHPNDE | AEQXRLYKNS | TTYISVGTST | LXQRLVPKIA | TRPKVNGQSG |
| 3982-21/B2 | HNTNQEDLLV | LWGIHHPNDE | EEQTRIYKNP | TTYISVGTST | LNQRLVPKIA | TRSKVNGQSG |
| 3982-43/B1 | HNTNQEDLLV | LWGIHHPNDE | EEQKRIYKNP | TTYISVGTST | LNQRLVPKIA | TRSKVNGQSG |
| 3982-50/B1 | HNTNQEDLLV | LWGIHHPNDE | EEQTRIYKNP | TTYISVGTST | LNQRLVPKIA | TRSKVNGQSG |
| 3982-52/B1 | HNTNQEDLLV | LWGIHHPNDE | EEQKRIYKNP | TTYVSVGTST | LNQRLVPKIA | TRSKVNGQSG |
| 3982-55/A1 | NNTNQEDLLV | LWGIHHPNDA | AEQTMLYQNP | TTYVSVGTST | LNQRLVPKIA | TRSKVNGQSG |
| 3982-56/A1 | NNTNQEDLLV | LWGIHHPNDA | AEQTRLYQNP | TTYISVGTST | LNQRLVPKIA | TRSKVNGQSG |
| 3982-78/B2 | HNTNQEDLLV | LWGIHHPNDE | EEQTRIYKNP | TTYISVGTST | LNQRLVPKIA | TRSKVNGQSG |
| 4794-17/B | HNINKEDLLV | LWGIHHPNDE | EEQIRIYKNP | TTYISVGTST | LNQRLVPKIA | TRSKVNGQSG |
| 4794-18/B | HNINKEDLLV | LWGIHHPNDE | EEQIRIYKNP | TTYISVGTST | LNQRLVPKIA | TRSKVNGQSG |
| | ....\|....\| | ....\|....\| | ....\|....\| | ....\|....\| | ....\|....\| | ....\|....\| |
| | 245 | 255 | 265 | 275 | 285 | 295 |
| 1553-1/A1 | RMEFFWTILK | SNDAINFESN | GNFIAPENAY | KIVKKGDSTI | MKSELEYGNC | NTKCQTPIGA |
| 1553-15/A1 | RMEFFWTILK | SNDAINFESN | GNFIAPENAY | KIVKKGDSTI | MKSELEYGNC | NTKCQTPIGA |
| 2095-50/A1 | RMEFFWTILK | SNDAINFESN | GNFIAPENAY | KIVKKGDSTI | MKSELEYGNC | NTKCQTPIGA |
| 3982-2/A1 | RMEFFWTILK | SNDAINFESN | GNFIAPENAY | KIVKKGDSTI | MKSELEYGNC | NTKCQTPIGA |
| 3982-5/A1 | RMEFFWTILK | SNDAINFESN | GNFIAPENAY | KIVKKGDSTI | MKSELEYGNC | NTKCQTPIGA |
| 3982-7/A1 | RMEFFWTILK | SNDAINFESN | GNFIAPENAY | KIVKKGDSTI | MKSELEYGDC | NTKCQTPIGA |
| 3982-8/A1 | RMEFFWTILK | SNDAINFESN | GNFIAPENAY | KIVKKGDSTI | MKSELEYGDC | NTKCQTPIGA |
| 3982-9/A1 | RMEFFWTILK | SNDAINFESN | GNFIAPENAY | KIVKKGDSTI | MKSELEYGNC | NTKCQTPIGA |
| 3982-12/A1 | RMEFFWTILK | SNDAINFESN | GNFIAPENAY | KIVKKGDSTI | MKSELEYGNC | NTKCQTPIGA |
| 3982-20/A1 | RMEFFWTILK | SNDAINFESN | GNFIAPENAY | KIVKKGDSTI | MKSELEYGNC | NTKCQTPIGA |
| 3982-44/A1 | RMEFFWTILK | SNDAINFESN | GNFIAPENAY | KIVKKGDSTI | MKSELEYGNC | NTKCQTPIGA |
| 1553-2/B1 | RVEFFWTILK | SNDTINFESN | GNFIAPENAY | KIVKKGDSTI | MKSELEYGNC | STKCQTPIGA |
| 1553-6/B1 | RVEFFWTILK | SNDTINFESN | GNFIAPENAY | KIVKKGDSTI | MKSELEYGNC | STKCQTPVGA |
| 1553-13/B2 | RVEFFWTILK | SNDTINFESN | GNFIAPENAY | KIVKKGDSTI | MKSELEYGNC | NTKCQTPIGA |
| 1553-26/B2 | RVEFFWTILK | SNDTINFESN | GNFIAPENAY | KIVKKGDSTI | MKSELEYGNC | NTKCQTPIGA |
| 1553-28/B1 | RVEFFWTILK | SNDTINFESN | GNFIAPKNAY | KIVKKGSSTI | MKSELEYGNC | STKCQTPIGA |
| 2095-39/B2 | RVEFFWTILK | SNDTINFESN | GNFIAPENAY | KIVKKGDSTI | MKSELEYGNC | NTKCQTPIGA |
| 2095-46/B1 | RVEFFWTILK | SNDTINFESN | GNFIAPKNAY | KIVKKGSSTI | MKSELEYGNC | STKCQTPIGA |
| 2095-49/B1 | RVEFFWTILK | SNDTINFESN | GNFIAPKNAY | KIVKKGSSTI | MKSELEYGNC | STKCQTPIGA |
| 2095-65/B1 | RVEFFWTILK | SNDTINFESN | GNFIAPKNAY | KIVKKGSSTI | MKSELEYGNC | STKCQTPIGA |
| 2095-68/B2 | RVEFFWTILK | SNDTINFESN | GNFIAPENAY | KIVKKGDSTI | MKSELEHGNC | NTKCQTPIGA |
| 2095-70/B2 | RVEFFWTILK | SNDTINFESN | GNFIAPENAY | KIVKKGDSTI | MKSELEYGNC | NTKCQTPIGA |
| 2095-73/B2 | RVEFFWTILK | SNDTINFESN | GNFIAPENAY | KIVKKGDSTI | MKSELEYGNC | NTKCQTPIGA |
| 2095-75/B2 | RVEFFWTILK | SNDTINFESN | GNFIAPENAY | KIVKKGDSTI | MKSELEYGNC | NTKCQTPIGA |
| 3982-3/B1 | RVEFFWTILK | SNDTINFESN | GNFIAPKNAY | KIVKKGSSTI | MKSELEYGNC | STKCQTPIGA |
| 3982-4/B1 | RVEFFWTILK | SNDTINFESN | GNFIAPKNAY | KIVKKGSSTI | MKSELEYGNC | STKCQTPIGA |
| 3982-13/B1 | RVEFFWTILK | SNDTINFESN | GNFIAPKNAY | KIVKKGSSTI | MKSELEYGNC | STKCQTPIGA |
| 3982-14/B2 | RVEFFWTILK | SNDTINFESN | GNFIAPENAY | KIVKKGDSTI | MKSELEYGNC | STKCQTPIGA |
| 3982-19/B3 | RVEFFWTILK | SNDVINFESN | GNFIAPENAY | KIVKKGDSTI | MKSDLEYGNC | STKCQTPIGA |
| 3982-21/B2 | RVEFFWTILK | SNDTINFESN | GNFIAPENAY | KIVKKGDSTI | MKSELEYGNC | NTKCQTPIGA |
| 3982-43/B1 | RVEFFWTILK | SNDTINFESN | GNFIAPENAY | KIVKKGDSTI | MKSELEYGNC | STKCQTPIGA |
| 3982-50/B1 | RVEFFWTILK | SNDTINFESN | GNFIAPENAY | KIVKKGDSTI | MKSELEYGNC | STKCQTPVGA |
| 3982-52/B1 | RVEFFWTILK | SNDTINFESN | GNFIAPENAY | KIVKKGDSTI | MKSELEYGNC | STKCQTPIGA |
| 3982-55/A1 | RMEFFWTILK | SNDAINFESN | GNFIAPENAY | KIVKKGDSTI | MKSELEYGNC | NTKCQTPIGA |
| 3982-56/A1 | RMEFFWTILK | SNDAINFESN | GNFIAPENAY | KIVKKGDSTI | MKSELEYGNC | NTKCQTPIGA |
| 3982-78/B2 | RVEFFWTILK | SNDTINFESN | GNFIAPENAY | KIVKKGDSTI | MKSELEYGNC | NTKCQTPIGA |
| 4794-17/B | RVEFFWTILK | SNDTINFESN | GNFIAPENAY | KIVKKGDSTI | MKSELEYGNC | NTKCQTPIGA |
| 4794-18/B | RVEFFWTILK | SNDTINFESN | GNFIAPENAY | KIVKKGDSTI | MKSELEYGNC | NTKCQTPIGA |
| | ....\|....\| | ....\|....\| | ....\|....\| | ....\|....\| | ....\|....\| | ....\|....\| |
| | 305 | 315 | 325 | 335 | 345 | 355 |
| 1553-1/A1 | INSSMPFHNI | HPLTIGECPK | YVKSNRLVLA | TGLRNSPQEE | RRRKKRGLFG | AIAGFIEGGW |
| 1553-15/A1 | INSSMPFHNI | HPLTIGECPK | YVKSNRLVLA | TGLRNSPQGE | RRRKKRGLFG | AIAGFIEGGW |
| 2095-50/A1 | INSSMPFHNI | HPLTIGECPK | YVKSNRLVLA | TGLRNSPQGE | RRRKKRGLFG | AIAGFIEGGW |
| 3982-2/A1 | INSSMPFHNI | HPLTIGECPK | YVKSNRLVLA | TGLRNSPHGE | RRRKKRGLFG | AIAGFIEGGW |
| 3982-5/A1 | INSSMPFHNI | HPLTIGECPK | YVKSNRLVLA | TGLRNSPQGE | RRRKKRGLFG | AIAGFIEGGW |
| 3982-7/A1 | INSSMPFHNI | HPLTIGECPK | YVKSNRLVLA | TGLRNSPQGE | RRRKKRGLFG | AIAGFIEGGW |
| 3982-8/A1 | INSSMPFHNI | HPLTIGECPK | YVKSNRLVLA | TGLRNSPQGE | RRRKKRGLFG | AIAGFIEGGW |
| 3982-9/A1 | INSSMPFHNI | HPLTIGECPK | YVKSNRLVLA | TGLRNSPQGE | RRRKKRGLFG | AIAGFIEGGW |
| 3982-12/A1 | INSSMPFHNI | HPLTIGECPK | YVKSNRLVLA | TGLRNSPQGE | RRRKKRGLFG | AIAGFIEGGW |
| 3982-20/A1 | INSSMPFHNI | HPLTIGECPK | YVKSNRLVLA | TGLRNSPQGE | RRRKKRGLFG | AIAGFIEGGW |
| 3982-44/A1 | INSSMPFHNI | HPLTIGECPK | YVKSNRLVLA | TGLRNSPQGE | RRRKKRGLFG | AIAGFIEGGW |
| 1553-2/B1 | INTSMPFHNI | HPLTIGECPK | YVKSNRLVLA | TGLRNSPQGE | GRRKKRGLFG | AIAGFIEGGW |
| 1553-6/B1 | INSSMPFHNI | HPLTIGECPK | YVKSNRLVLA | TGLRNSPQGE | GRRKKRGLFG | AIAGFIEGGW |
| 1553-13/B2 | INSSMPFHNI | HPLTIGECPK | YVKSNRLVLA | TGLRNSPQGE | GRRKKRGLFG | AIAGFIEGGW |
| 1553-26/B2 | INSSMPFHNI | HPLTIGECPK | YVKSNRLVLA | TGLRNSPQGE | GRRKKRGLFG | AIAGFIEGGW |
| 1553-28/B1 | INSSMPFHNI | HPLTIGECPK | YVKSNRLVLA | TGLRNSPQGE | GRRKKRGLFG | AIAGFIEGGW |
| 2095-39/B2 | INSSMPFHNI | HPLTIGECPK | YVKSNRLVLA | TGLRNSPQGE | GRRKKRGLFG | AIAGFIEGGW |
| 2095-46/B1 | INSSMPFHNI | HPLTIGECPK | YVKSNRLVLA | TGLRNSPQGE | GRRKKRGLFG | AIAGFIEGGW |
| 2095-49/B1 | INSSMPFHNI | HPLTIGECPK | YVKSNRLVLA | TGLRNSPQGE | GRRKKRGLFG | AIAGFIEGGW |
| 2095-65/B1 | INSSMPFHNI | HPLTIGECPK | YVKSNRLVLA | TGLRNSPQGE | GRRKKRGLFG | AIAGFIEGGW |
| 2095-68/B2 | INSSMPFHNI | HPLTIGECPK | YVKSNRLVLA | TGLRNSPQGE | GRRKKRGLFG | AIAGFIEGGW |
| 2095-70/B2 | INSSMPFHNI | HPLTIGECPK | YVKSNRLVLA | TGLRNSPQGE | GRRKKRGLFG | AIAGFIEGGW |
| 2095-73/B2 | INSSMPFHNI | HPLTIGECPK | YVKSNRLVLA | TGLRNSPQGE | GRRKKRGLFG | AIAGFIEGGW |
| 2095-75/B2 | INSSMPFHNI | HPLTIGECPK | YVKSNRLVLA | TXLRNSPQGE | GRRKKRGLFG | AIAGFIEGGW |
| 3982-3/B1 | INSSMPFHNI | HPLTIGECPK | YVKSNRLVLA | TGLRNSPQGE | GRRKKRGLFG | AIAGFIEGGW |
| 3982-4/B1 | INSSMPFHNI | HPLTIGECPK | YVKSNRLVLA | TGLRNSPQGE | GRRKKRGLFG | AIAGFIEGGW |
| 3982-13/B1 | INSSMPFHNI | HPLTIGECPK | YVKSNRLVLA | TGLRNSPQGE | GRRKKRGLFG | AIAGFIEGGW |
| 3982-14/B2 | INSSMPFHNI | HPLTIGECPK | YVKSNRLVLA | TGLRNSPQEE | GRRKKRGLFG | AIAGFIEGGW |
| 3982-19/B3 | INSSMPFHNI | HPLTIGECPK | YVKSNRLVLA | TGLRNSPQGE | RRRKKRGLFG | AIAGFIEGGW |
| 3982-21/B2 | INSSMPFHNI | HPLTIGECPK | YVKSNRLVLA | TGLRNSPQGE | GRRKKRGLFG | AIAGFIEGGW |
| 3982-43/B1 | INTSMPFHNI | HPLTIGECPK | YVKSNRLVLA | TGLRNSPQGE | GRRKKRGLFG | AIAGFIEGGW |
| 3982-50/B1 | INSSMPFHNI | HPLTIGECPK | YVXSNRLVLA | TGLRNSPQGE | GRRKKRGLFG | AIAGFIEGGW |
| 3982-52/B1 | INTSMPFHNI | HPLTIGECPK | YVKSNRLVLA | TGLRNSPQGE | GRRKKRGLFG | AIAGFIEGGW |
| 3982-55/A1 | INSSMPFHNI | HPLTIGECPK | YVKSNRLVLA | TGLRNSPQGE | RRRKKRGLFG | AIAGFIEGGW |
| 3982-56/A1 | INSSMPFHNI | HPLTIGECPK | YVKSNRLVLA | TGLRNSPQGE | RRRKKRGLFG | AIAGFIEGGW |
| 3982-78/B2 | INSSMPFHNI | HPLTIGECPK | YVKSNRLVLA | TGLRNSPQGE | GRRKKRGLFG | AIAGFIEGGW |
| 4794-17/B | INSSMPFHNI | HPLTIGECPK | YVKSNRLVLA | TGLRNSPQGE | GRRKKRGLFG | AIAGFIEGGW |
| 4794-18/B | INSSMPFHNI | HPLTIGECPK | YVKSNRLVLA | TGLRNSPQGE | GRRKKRGLFG | AIAGFIEGGW |
| | ....\|....\| | ....\|....\| | ....\|....\| | ....\|....\| | ....\|....\| | ....\|....\| |
| | 365 | 375 | 385 | 395 | 405 | 415 |
| 1553-1/A1 | QGMVDGWYGY | HHSNEQGSGY | AADKESTQKA | IDGVTNKVNS | IIDKMNTQFE | AVGREFNNLE |
| 1553-15/A1 | QGMVDGWYGY | HHSNEQGSGY | AADKESTQKA | IDGVTNKVNS | IIDKMNTQFE | AVGREFNNLE |
| 2095-50/A1 | QGMVDGWYGY | HHSNEQGSGY | AADKESTQKA | IDGVTNKVNS | IIDKMNTQFE | AVGREFNNLE |
| 3982-2/A1 | QGMVDGWYGY | HHSNEQGSGY | AADKESTQKA | IDGVTNKVNS | IIDKMNTQFE | AVGREFNNLE |
| 3982-5/A1 | QGMVDGWYGY | HHSNEQGSGY | AADKESTQKA | IDGVTNKVNS | IIDKMNTQFE | AVGREFNNLE |
| 3982-7/A1 | QGMVDGWYGY | HHSNEQGSGY | AADKESTQKA | IDGVTNKVNS | IIDKMNTQFE | AVGREFNNLE |
| 3982-8/A1 | QGMVDGWYGY | HHSNEQGSGY | AADKESTQKA | IDGVTNKVNS | IIDKMNTQFE | AVGREFNNLE |
| 3982-9/A1 | QGMVDGWYGY | HHSNEQGSGY | AADKESTQKA | IDGVTNKVNS | IIDKMNTQFE | AVGREFNNLE |
| 3982-12/A1 | QGMVDGWYGY | HHSNEQGSGY | AADKESTQKA | IDGVTNKVNS | IIDKMNTQFE | AVGREFNNLE |
| 3982-20/A1 | QGMVDGWYGY | HHSNEQGSGY | AADKESTQKA | IDGVTNKVNS | IIDKMNTQFE | AVGREFNNLE |
| 3982-44/A1 | QGMVDGWYGY | HHSNEQGSGY | AADKESTQKA | IDGVTNKVNS | IIDKMNTQFE | AVGREFNNLE |
| 1553-2/B1 | QGMVDGWYGY | HHSNEQGSGY | AADKESTQKA | IDGVTNKVNS | IIDKMNTQFE | AVGREFNNLE |
| 1553-6/B1 | QGMVDGWYGY | HHSNXQGSGY | AADRESTQKA | IDGVTNKVNS | IIDKMNTQFE | AVGREFNNLE |
| 1553-13/B2 | QGMVDGWYGY | HHSNEQGSGY | AADKESTQKA | IDGVTNKVNS | IIDKMNTQFE | AVGREFNNLE |
| 1553-26/B2 | QGMVDGWYGY | HHSNEQGSGY | AADKESTQKA | IDGVTNKVNS | IIDKMNTQFE | AVGREFNNLE |
| 1553-28/B1 | QGMVDGWYGY | HHSNEQGTGY | AADKESTQKA | IDGVTNKVNS | IIDKMNTQFE | AVGREFNNLE |
| 2095-39/B2 | QGMVDGWYGY | HHSNEQGSGY | AADKESTQKA | IDGVTNKVNS | IIDKMNTQFE | AVGREFNNLE |
| 2095-46/B1 | QGMVDGWYGY | HHSNEQGTGY | AADKESTQKA | IDGVTNKVNS | IIDKMNTQFE | AVGREFNNLE |
| 2095-49/B1 | QGMVDGWYGY | HHSNEQGTGY | AADKESTQKA | IDGVTNKVNS | IIDKMNTQFE | AVGREFNNLE |
| 2095-65/B1 | QGMVDGWYGY | HHSNEQGTGY | AADKESTQKA | IDGVTNKVNS | IIDKMNTQFE | AVGREFNNLE |
| 2095-68/B2 | QGMVDGWYGY | HHSNEQGSGY | AADKESTQKA | IDGVTNKVNS | IIDKMNTQFE | AVGREFNNLE |
| 2095-70/B2 | QGMVDGWYGY | HHSNEQGSGY | AADKESTQKA | IDGVTNKVNS | IIDKMNTQFE | AVGREFNNLE |
| 2095-73/B2 | QGMVDGWYGY | HHSNEQGSGY | AADKESTQKA | IDGVTNKVNS | IIDKMNTQFE | AVGREFNNLE |
| 2095-75/B2 | QGMVDGWYGY | HHSNEQGSGY | AADKESTQKA | IDGVTNKVNS | IIDKMNTQFE | AVGREFNNLE |
| 3982-3/B1 | QGMVDGWYGY | HHSNEQGTGY | AADKESTQKA | IDGVTNKVNS | IIDKMNTQFE | AVGREFNNLE |
| 3982-4/B1 | QGMVDGWYGY | HHSNEQGTGY | AADKESTQKA | IDGVTNKVNS | IIDKMNTQFE | AVGREFNNLE |
| 3982-13/B1 | QGMVDGWYGY | HHSNEQGTGY | AADKESTQKA | IDGVTNKVNS | IIDKMNTQFE | AVGREFNNLE |
| 3982-14/B2 | QGMVDGWYGY | HHSNEQGSGY | AADKESTQKA | IDGVTNKVNS | IIDKMNTQFE | AVGREFNNLE |
| 3982-19/B3 | QGMVDGWYGY | HHSNEQGSGY | AADKESTQKA | IDGVTNKVNS | IIDKMNTQFE | AVGREFNNLE |
| 3982-21/B2 | QGMVDGWYGY | HHSNEQGSGY | AADKESTQKA | IDGVTNKVNS | IIDKMNTQFE | AVGREFNNLE |
| 3982-43/B1 | QGMVDGWYGY | HHSNEQGSGY | AADKESTQKA | INGVTNKVNS | IIDKMNTQFE | AVGREFNNLE |
| 3982-50/B1 | QGMVDGWYGY | HHSNEQGSGY | AADRESTQKA | IDGVTNKVNS | IIDKMNTQFE | AVGREFNNLE |
| 3982-52/B1 | QGMVDGWYGY | HHSNEQGSGY | AADKESTQKA | IDGVTNKVNS | IIDKMNTQFE | AVGREFNNLE |
| 3982-55/A1 | QGMVDGWYGY | HHSNEQGSGY | AADKESTQKA | IDGVTNKVNS | IIDKMNTQFE | AVGREFNNLE |
| 3982-56/A1 | QGMVDGWYGY | HHSNEQGSGY | AADKESTQKA | IDGVTNKVNS | IIDKMNTQFE | AVGREFNNLE |
| 3982-78/B2 | QGMVDGWYGY | HHSNEQGSGY | AADKESTQKA | IDGVTNKVNS | IIDKMNTQFE | AVGREFNNLE |
| 4794-17/B | QGMVDGWYGY | HHSNEQGSGY | AADKESTQKA | IDGVTNKVNS | IIDKMNTQFE | AVGREFNNLE |
| 4794-18/B | QGMVDGWYGY | HHSNEQGSGY | AADKESTQKA | IDGVTNKVNS | IIDKMNTQFE | AVGREFNNLE |
| | ....\|....\| | ....\|....\| | ....\|....\| | ....\|....\| | ....\|....\| | ....\|....\| |
| | 425 | 435 | 445 | 455 | 465 | 475 |
| 1553-1/A1 | RRIENLNKKM | EDGFLDVWTY | NAELLVLMEN | ERTLDFHDSN | VKNLYDKVRL | QLRDNAKELG |
| 1553-15/A1 | RRIENLNKKM | EDGFLDVWTY | NAELLVLMEN | ERTLDFHDSN | VKNLYDRVRL | QLRDNAKELG |
| 2095-50/A1 | RRIENLNKKM | EDGFLDVWTY | NAELLVLMEN | ERTLDFHDSN | VKNLYDKVRL | QLRDNAKELG |
| 3982-2/A1 | RRIENLNKKM | EDGFLDVWTY | NAELLVLMEN | ERTLDFHDSN | VKNLYDKVRL | QLRDNAKELG |
| 3982-5/A1 | RRIENLNKKM | EDGFLDVWTY | NAELLVLMEN | ERTLDFHDSN | VKNLYDKVRL | QLRDNAKELG |
| 3982-7/A1 | RRIENLNKKM | EDGFLDVWTY | NAELLVLMEN | ERTLDFHDSN | VKNLYDKVRL | QLRDNAKELG |
| 3982-8/A1 | RRIENLNKKM | EDGFLDVWTY | NAELLVLMEN | ERTLDFHDSN | VKNLYDKVRL | QLRDNAKELG |
| 3982-9/A1 | RRIENLNKKM | EDGFLDVWTY | NAELLVLMEN | ERTLDFHDSN | VKNLYDKVRL | QLRDNAKELG |
| 3982-12/A1 | RRIENLNKKM | EDGFLDVWTY | NAELLVLMEN | ERTLDFHDSN | VKNLYDKVRL | QLRDNAKELG |
| 3982-20/A1 | RRIENLNKKM | EDGFLDVWTY | NAELLVLMEN | ERTLDFHDSN | VKNLYDKVRL | QLRDNAKELG |
| 3982-44/A1 | RRIENLNKKM | EDGFLDVWTY | NAELLVLMEN | ERTLDFHDSN | VKNLYDKVRL | QLRDNAKELG |
| 1553-2/B1 | KRIENLNKKM | EDGFLDVWTY | NAELLVLMEN | ERTLDFHDSN | VRNLYDKVRL | QLRDNAKELG |
| 1553-6/B1 | KRIENLNKKM | EDGFLDVWTY | NAELLVLMEN | ERTLDFHDSN | VKNLYDKVRL | QLRDNAKELG |
| 1553-13/B2 | KRIENLNKKM | EDGFLDVWTY | NAELLVLMEN | ERTLDFHDSN | VKNLYDKVRL | QLRDNAKELG |
| 1553-26/B2 | KRIENLNKKM | EDGFLDVWTY | NAELLVLMEN | ERTLDFHDSN | VKNLYDKVRL | QLRDNAKELG |
| 1553-28/B1 | KRIENLNKKM | EDGFLDVWTY | NAELLVLMEN | ERTLDFHDSN | VRNLYDKVRL | QLRDNAKELG |
| 2095-39/B2 | KRIENLNKKM | EDGFLDVWTY | NAELLVLMEN | ERTLDFHDSN | VKNLYDKVRL | QLRDNAKELG |
| 2095-46/B1 | KRIENLNKKM | EDGFLDVWTY | NAELLVLMEN | ERTLDFHDSN | VRNLYDKVRL | QLRDNAKELG |
| 2095-49/B1 | KRIENLNKKM | EDGFLDVWTY | NAELLVLMEN | ERTLDFHDSN | VRNLYDKVRL | QLRDNAKELG |
| 2095-65/B1 | KRIENLNKKM | EDGFLDVWTY | NAELLVLMEN | ERTLDFHDSN | VRNLYDKVRL | QLRDNAKELG |
| 2095-68/B2 | KRIENLNKKM | EDGFLDVWTY | NAELLVLMEN | ERTLDFHDSN | VKNLYDKVRL | QLRDNAKELG |
| 2095-70/B2 | KRIENLNKKM | EDGFLDVWTY | NAELLVLMEN | ERTLDFHDSN | VKNLYDKVRL | QLRDNAKELG |
| 2095-73/B2 | KRIENLNKKM | EDGFLDVWTY | NAELLVLMEN | ERTLDFHDSN | VKNLYDKVRL | QLRDNAKELG |
| 2095-75/B2 | KRIENLNKKM | EDGFLDVWTY | NAELLVLMEN | ERTLDFHDSN | VKNLYDKVRL | QLRDNAKELG |
| 3982-3/B1 | KRIENLNKKM | EDGFLDVWTY | NAELLVLMEN | ERTLDFHDSN | VRNLYDKVRL | QLRDNAKELG |
| 3982-4/B1 | KRIENLNKKM | EDGFLDVWTY | NAELLVLMEN | ERTLDFHDSN | VRNLYDKVRL | QLRDNAKELG |
| 3982-13/B1 | KRIENLNKKM | EDGFLDVWTY | NAELLVLMEN | ERTLDFHDSN | VRNLYDKVRL | QLRDNAKELG |
| 3982-14/B2 | KRIENLNKKM | EDGFLDVWTY | NAELLVLMEN | ERTLDFHDSN | VKNLYDKVRL | QLRDNAKELG |
| 3982-19/B3 | RRIENLNKKM | EDGFLDVWTY | NAELLVLMEN | ERTLDFHDSN | VKNLYDKVRL | QLRDNAKELG |
| 3982-21/B2 | KRIENLNKKM | EDGFLDVWTY | NAELLVLMEN | ERTLDFHDSN | VKNLYDKVRL | QLRDNAKELG |
| 3982-43/B1 | KRIENLNKKM | EDGFLDVWTY | NAELLVLMEN | ERTLDFHDSN | VRNLYDKVRL | QLRDNAKELG |
| 3982-50/B1 | KRIENLNKKM | EDGFLDVWTY | NAELLVLMEN | ERTLDFHDSN | VKNLYDKVRL | QLRDNAKELG |
| 3982-52/B1 | KRIENLNKKM | EDGFLDVWTY | NAELLVLMEN | ERTLDFHDSN | VRNLYDKVRL | QLRDNAKELG |
| 3982-55/A1 | RRIENLNKKM | EDGFLDVWTY | NAELLVLMEN | ERTLDFHDSN | VKNLYDKVRL | QLRDNAKELG |
| 3982-56/A1 | RRIENLNKKM | EDGFLDVWTY | NAELLVLMEN | ERTLDFHDSN | VKNLYDKVRL | QLRDNAKELG |
| 3982-78/B2 | KRIENLNKKM | EDGFLDVWTY | NAELLVLMEN | ERTLDFHDSN | VKNLYDKVRL | QLRDNAKELG |
| 4794-17/B | KRIENLNKKM | EDGFLDVWTY | NAELLVLMEN | ERTLDFHDSN | VKNLYDKVRL | QLRDNAKELG |
| 4794-18/B | KRIENLNKKM | EDGFLDVWTY | NAELLVLMEN | ERTLDFHDSN | VKNLYDKVRL | QLRDNAKELG |
| | ....\|....\| | ....\|....\| | ....\|....\| | ....\|....\| | ....\|....\| | ....\|....\| |
| | 485 | 495 | 505 | 515 | 525 | 535 |
| 1553-1/A1 | NGCFEFYHRC | DNECMESVRN | GTYDYPQYSE | EARLKREEIS | GVKLESIGTY | QILSIYSTVA |
| 1553-15/A1 | NGCFEFYHRC | DNECMESVRN | GTYDYPQYSE | EARLKREEIS | GVKLESIGTY | QILSIYSTVA |
| 2095-50/A1 | NGCFEFYHRC | DNECMESVRN | GTYDYPQYSE | EARLKREEIS | GVKLESIGTY | QILSIYSTVA |
| 3982-2/A1 | NGCFEFYHRC | DNECMESVRN | GTYDYPQYSE | EARLKREEIS | GVKLESIGTY | QILSIYSTVA |
| 3982-5/A1 | NGCFEFYHRC | DNECMESVRN | GTYDYPQYSE | EARLKREEIS | GVKLESIGTY | QILSIYSTVA |
| 3982-7/A1 | NGCFEFYHRC | DNECMESVRN | GTYDYPQYSE | EARLKREEIS | GVKLESIGTY | QILSIYSTVA |
| 3982-8/A1 | NGCFEFYHRC | DNECMESVRN | GTYDYPQYSE | EARLKREEIS | GVKLESIGTY | QILSIYSTVA |
| 3982-9/A1 | NGCFEFYHRC | DNECMESVRN | GTYDYPQYSE | EARLKREEIS | GVKLESIGTY | QIL------- |
| 3982-12/A1 | NGCFEFYHRC | DNECMESVRN | GTYDYPQYSE | EARLKREEIS | GVKLESIGTY | QILSIYSTVA |
| 3982-20/A1 | NGCFEFYHRC | DNECMESVRN | GTYDYPQYSE | EARLKREEIS | GVKLESIGTY | QILSIYX--- |
| 3982-44/A1 | NGCFEFYHRC | DNECMESVRN | GTYDYPQYSE | EARLKREEIS | GVKLESIGTY | QILSIYSTVA |
| 1553-2/B1 | NGCFEFYHRC | DNECMESVRN | GTYDYPQYSE | EARLKREEIS | GVKLESIGTY | QILSIYSTVA |
| 1553-6/B1 | NGCFEFYHRC | DNECIESVRN | GTYDYPQYSE | EARLKREEIS | GVKLESIGTY | QILSIYSTVA |
| 1553-13/B2 | NGCFEFYHRC | DNECMESVRN | GTYDYPQYSE | EARLKREEIS | GVKLESIGTY | QILSIYSTVA |
| 1553-26/B2 | NGCFEFYHRC | DNECMESVRN | GTYDYPQYSE | EARLKREEIS | GVKLESIGTY | QILSIYSTVA |
| 1553-28/B1 | NGCFEFYHKC | DNECMESVRN | GTYDYPQYSK | EARLKREEIS | GVKLESIGTY | QILSIYSTVT |
| 2095-39/B2 | NGCFEFYHRC | DNECMESVRN | GTYDYPQYSE | EARLKREEIS | GVKLESIGTY | QILSIYSTVA |
| 2095-46/B1 | NGCFEFYHKC | DNECMESVRN | GTYDYPQYSK | EARLKREEIS | GVKLESIGTY | QILSIYSTVA |
| 2095-49/B1 | NGCFEFYHKC | DNECMESVRN | GTYDYPQYSK | EARLKREEIS | GVKLESIGTY | QILSIYSTVA |
| 2095-65/B1 | NGCFEFYHKC | DNECMESVRN | GTYDYPQYSK | EARLKREEIS | GVKLESIGTY | QILSIYSTVA |
| 2095-68/B2 | NGCFEFYHRC | DNECMESVRN | GTYDYPQYSE | EARLNREEIS | GVKLESIGTY | QILSIYSTVA |
| 2095-70/B2 | NGCFEFYHRC | DNECMESVRN | GTYDYPQYSE | EARLKREEIS | GVKLESIGTY | QILSIYSTVA |
| 2095-73/B2 | NGCFEFYHRC | DNECMESVRN | GTYDYPQYSE | EARLKREEIS | GVKLESIGTY | QILSIYSTVA |
| 2095-75/B2 | NGCFEFYHRC | DNECMESVRN | GTYDYPQYSE | EARLKREEIS | GVKLESIGTY | QILSIYSTVA |
| 3982-3/B1 | NGCFEFYHKC | DNECMESVRN | GTYDYPQYSK | EARLKREEIS | GVKLESIGTY | QILSIYSTVA |
| 3982-4/B1 | NGCFEFYHKC | DNECMESVRN | GTYDYPQYSK | EARLKREEIS | GVKLESIGTY | QILSIYSTVA |
| 3982-13/B1 | NGCFEFYHKC | DNECMESVRN | GTYDYPQYSK | EARLKREEIS | GVKLESIGTY | QILSIYSTVA |
| 3982-14/B2 | NGCFEFYHRC | DNECMESVRN | GTYDYPQYSE | EARLKREEIS | GVKLESIGTY | QILSIYSTVA |
| 3982-19/B3 | NGCFEFYHRC | DNECMESVRN | GTYDYPQYSE | EARLKREEIS | GAKLESIGTY | QIX------- |
| 3982-21/B2 | NGCFEFYHRC | DNECMESVKN | GTYDYPQYSE | EARLKREEIS | GVKLESIGTY | QILSIYSTVA |
| 3982-43/B1 | NGCFEFYHRC | DNECMESVRN | GTYDYPQYSK | EARLKREEIS | GVKLESIGTY | QILSIYSTVA |
| 3982-50/B1 | NGCFEFYHRC | DNECIESVRN | GTYDYPQYSE | EARLKREEIS | GVKLESIGTY | QILSIYSTVA |
| 3982-52/B1 | NGCFEFYHRC | DNECMESVRN | GTYDYPQYSE | EARLKREEIS | GVKLEX---- | ---------- |
| 3982-55/A1 | NGCFEFYHRC | DNECMESVRN | GTYDYPQYSE | EARLKREEIS | GVKLESIGTX | QI-------- |
| 3982-56/A1 | NGCFEFYHRC | DNECMESVRN | GTYDYPQYSE | EARLKREEIS | GVKLESIGTX | QIX------- |
| 3982-78/B2 | NGCFEFYHRC | DNECMESVRN | GTYDYPQYSE | EARLKREEIS | GVKLESIGTY | QIL*IYSTVA |
| 4794-17/B | NGCFEFYHRC | DNECMESVRN | GTYDYPQYSE | EARLKREEIS | GVKLESIGTY | QILSIYSTVA |
| 4794-18/B | NGCFEFYHRC | DNECMESVRN | GTYDYPQYSE | EARLKREEIS | GVKLESIGTY | QILSIYSTVA |
| | ....\|....\| | ....\|....\| | ....\|.... | | | |
| | 545 | 555 | 565 | | | |
| 1553-1/A1 | SSLALAIMVA | GLFLWMCSNG | SLQCRICI* | | | |
| 1553-15/A1 | SSLALAIMVA | GLFLWMCSNG | SLQCRICI* | | | |
| 2095-50/A1 | SSLALAIMVA | GLFLWMCSNG | X-------- | | | |
| 3982-2/A1 | SSLALAIMVX | ---------- | --------- | | | |
| 3982-5/A1 | SSLALAIM-- | ---------- | --------- | | | |
| 3982-7/A1 | SSLALAIMVA | GLFLWMCSNG | X-------- | | | |
| 3982-8/A1 | SSLALAIMVX | ---------- | --------- | | | |
| 3982-9/A1 | ---------- | ---------- | --------- | | | |
| 3982-12/A1 | SSLALAIX-- | ---------- | --------- | | | |
| 3982-20/A1 | ---------- | ---------- | --------- | | | |
| 3982-44/A1 | SSLALAIX-- | ---------- | --------- | | | |
| 1553-2/B1 | SSLALAIMVA | GLFLWMCSNG | SLQCRICI* | | | |
| 1553-6/B1 | SSLALAIIVA | GLFLWMCSNG | SLQCRICI* | | | |
| 1553-13/B2 | SSLALAIMMA | GLFLWMCSNG | SLQCRICI* | | | |
| 1553-26/B2 | SSLALAIMMA | GLFLWMCSNG | SLQCRICI* | | | |
| 1553-28/B1 | SSLALAIMVA | GLSLWMCSNG | SLQCRICI* | | | |
| 2095-39/B2 | SSLALAIMMA | GLFLWX---- | --------- | | | |
| 2095-46/B1 | SSLALAIMVA | GLSLWMCSX- | --------- | | | |
| 2095-49/B1 | SSLALAIMVA | GLSLWMCSNG | SLQCRICI- | | | |
| 2095-65/B1 | SSLALAIMVA | GLSLWM---- | --------- | | | |
| 2095-68/B2 | SSLALAIMMA | GLFLWMCSNG | X-------- | | | |
| 2095-70/B2 | GSLALAIMMA | GLFLWMCSNG | SLQ------ | | | |
| 2095-73/B2 | SSLALAIMVX | ---------- | --------- | | | |
| 2095-75/B2 | GSLALAIMVX | ---------- | --------- | | | |
| 3982-3/B1 | SSLALAIMVA | GLSLWMCSNG | SLQ------ | | | |
| 3982-4/B1 | SSLALAIMVA | GLSLWMCSNG | SLQCRX--- | | | |
| 3982-13/B1 | SSLALAIMVA | X--------- | --------- | | | |
| 3982-14/B2 | SSLALAIMVA | GLFLWMCSNG | SLQCRICI* | | | |
| 3982-19/B3 | ---------- | ---------- | --------- | | | |
| 3982-21/B2 | SSLALAIM-- | ---------- | --------- | | | |
| 3982-43/B1 | SSLALAIM-- | ---------- | --------- | | | |
| 3982-50/B1 | SSLALAIM-- | ---------- | --------- | | | |
| 3982-52/B1 | ---------- | ---------- | --------- | | | |
| 3982-55/A1 | ---------- | ---------- | --------- | | | |
| 3982-56/A1 | ---------- | ---------- | --------- | | | |
| 3982-78/B2 | SSLALAX--- | ---------- | --------- | | | |
| 4794-17/B | SSLALAI--- | ---------- | --------- | | | |
| 4794-18/B | SSLALAIMMA | GLFLWMCSNG | X-------- | | | |

TABLE C
The following shows SEQ ID NOs: 100 to 137, which correspond to
the variant sequences as set forth in SEQ ID NOs: 9 to 46 starting with
the N-terminal amino acid D17 and having a full length C-terminal sequence,
wherein the numbering of said first N-terminal amino acid position (D17)
refers to the amino acid position 17 as exemplarily given in SEQ ID NO 8,
and wherein the full length C-terminal sequence corresponds to amino
acids 527 to 568, wherein the numbering of said amino acid positions
refers to the amino acid positions 527 to 568 as exemplarily given
in SEQ ID NO: 47:

| | ....\|....\| | ....\|....\| | ....\|....\| | ....\|....\| | ....\|....\| | ....\|....\| |
|---|---|---|---|---|---|---|
| | 5 | 15 | 25 | 35 | 45 | 55 |
| 1553-1/A1 | (SEQ ID NO: 100) | DQIC | IGYHANNSTE | QVDTIMEKNV | TVTHAQDILE | KTHNGKLCNL |
| 1553-15/A1 | (SEQ ID NO: 101) | DQIC | IGYHANNSTE | QVDTIMEKNV | TVTHAQDILE | KTHNGKLCNL |
| 2095-50/A1 | (SEQ ID NO: 102) | DQIC | IGYHANNSTE | QVDTIMEKNV | TVTHAQDILE | KTHNGKLCNL |
| 3982-2/A1 | (SEQ ID NO: 103) | DQIC | IGYHANNSTE | QVDTIMEKNV | TVTHAQDILE | KTHNGKLCNL |
| 3982-5/A1 | (SEQ ID NO: 104) | DQIC | IGYHANNSTE | QVDTIMEKNV | TVTHAQDILE | KTHNGKLCNL |
| 3982-7/A1 | (SEQ ID NO: 105) | DQIC | IGYHANNSTE | QVDTIMEKNV | TVTHAQDILE | KTHNGKLCNL |
| 3982-8/A1 | (SEQ ID NO: 106) | DQIC | IGYHANNSTE | QVDTIMEKNV | TVTHAQDILE | KTHNGKLCNL |
| 3982-9/A1 | (SEQ ID NO: 107) | DQIC | IGYHANNSTE | QVDTIMEKNV | TVTHAQDILE | KTHNGKLCNL |
| 3982-12/A1 | (SEQ ID NO: 108) | DQIC | IGYHANNSTE | QVDTIMEKNV | TVTHAQDILE | KTHNGKLCNL |
| 3982-20/A1 | (SEQ ID NO: 109) | DQIC | IGYHANNSTE | QVDTIMEKNV | TVTHAQDILE | KTHNGKLCNL |
| 3982-44/A1 | (SEQ ID NO: 110) | DQIC | IGYHANNSTE | QVDTIMEKNV | TVTHAQDILE | KTHNGKLCNL |
| 1553-2/B1 | (SEQ ID NO: 111) | DQIC | IGYHANNSTE | QVDTIMEKNV | TVTHAQDILE | KTHNGKLCDL |
| 1553-6/B1 | (SEQ ID NO: 112) | DQIC | IGYHANNSTE | QVDTIMEKNV | TVTHAQDILE | KTHNGKLCDL |
| 1553-13/B2 | (SEQ ID NO: 113) | DQIC | IGYHANNSTE | QVDTIMEKNV | TVTHAQDILE | KTHNGKLCDL |
| 1553-26/B2 | (SEQ ID NO: 114) | DQIC | IGYHANNSTE | QVDTIMEKNV | TVTHAQDILE | KTHNGKLCDL |
| 1553-28/B1 | (SEQ ID NO: 115) | DQIC | IGYHANNSTE | QVDTIMEKNV | TVTHAQDILE | KTHNGKLCDL |
| 2095-39/B2 | (SEQ ID NO: 116) | DQIC | IGYHANNSTE | QVDTIMEKNV | TVTHAQDILE | KTHNGKLCDL |
| 2095-46/B1 | (SEQ ID NO: 117) | DQIC | IGYHANNSTE | QVDTIMEKNV | TVTHAQDILE | KTHNGKLCDL |
| 2095-49/B1 | (SEQ ID NO: 118) | DQIC | IGYHANNSTE | QVDTIMEKNV | TVTHAQDILE | KTHNGKLCDL |
| 2095-65/B1 | (SEQ ID NO: 119) | DQIC | IGYHANNSTE | QVDTIMEKNV | TVTHAQDILE | KTHNGKLCDL |
| 2095-68/B2 | (SEQ ID NO: 120) | DQIC | IGYHANNSTE | QVDTIMEKNV | TVTHAQDILE | KTHNGKLCDL |
| 2095-70/B2 | (SEQ ID NO: 121) | DQIC | IGYHANNSTE | QVDTIMEKNV | TVTHAQDILE | KTHNGKLCDL |
| 2095-73/B2 | (SEQ ID NO: 122) | DQIC | IGYHANNSTE | QVDTIMEKNV | TVTHAQDILE | KTHNGKLCDL |
| 2095-75/B2 | (SEQ ID NO: 123) | DQIC | IGYHANNSTE | QVDTIMEKNV | TVTHAQDILE | KTHNGKLCDL |
| 3982-3/B1 | (SEQ ID NO: 124) | DQIC | IGYHANNSTE | QVDTIMEKNV | TVTHAQDILE | KTHNGKLCDL |
| 3982-4/B1 | (SEQ ID NO: 125) | DQIC | IGYHANNSTE | QVDTIMEKNV | TVTHAQDILE | KTHNGKLCDL |
| 3982-13/B1 | (SEQ ID NO: 126) | DQIC | IGYHANNSTE | QVDTIMEKNV | TVTHAQDILE | KTHNGKLCDL |
| 3982-14/B2 | (SEQ ID NO: 127) | DQIC | IGYHANNSTE | QVDTIMEKNV | TVTHAQDILE | KTHNGKLCDL |
| 3982-19/B3 | (SEQ ID NO: 128) | DQIC | IGXHANNSTE | QVDTIMEKNI | TVTHAQDILE | KTHNGKLCDL |
| 3982-21/B2 | (SEQ ID NO: 129) | DQIC | IGYHANNSTE | QVDTIMEKNV | TVTHAQDILE | KTHNGKLCDL |
| 3982-43/B1 | (SEQ ID NO: 130) | DQIC | IGYHANNSTE | QVDTIMEKNV | TVTHAQDILE | KTHNGKLCDL |
| 3982-50/B1 | (SEQ ID NO: 131) | DQIC | IGYHANNSTE | QVDTIMEKNV | TVTHAQDILE | KTHNGKLCDL |
| 3982-52/B1 | (SEQ ID NO: 132) | DQIC | IGYHANNSTE | QVDTIMEKNV | TVTHAQDILE | KTHNGKLCDL |
| 3982-55/A1 | (SEQ ID NO: 133) | DQIC | IGYHANNSTE | QVDTIMEKNV | TVTHAQDILE | KTHNGKLCNL |
| 3982-56/A1 | (SEQ ID NO: 134) | DQIC | IGXHANNSTE | QVDTIMEKNV | TVTHAQDILE | KTHNGKLCNL |
| 3982-78/B2 | (SEQ ID NO: 135) | DQIC | IGYHANNSTE | QVDTIMEKNV | TVTHAQDILE | KTHNGKLCDL |
| 4794-17/B | (SEQ ID NO: 136) | DQIC | IGYHANNSTE | QVDTIMEKNV | TVTHAQDILE | KTHNGKLCDL |
| 4794-18/B | (SEQ ID NO: 137) | DQIC | IGYHANNSTE | QVDTIMEKNV | TVTHAQDILE | KTHNGKLCDL |
| | ....\|....\| | ....\|....\| | ....\|....\| | ....\|....\| | ....\|....\| | ....\|....\| |
| | 65 | 75 | 85 | 95 | 105 | 115 |
| 1553-1/A1 | DGVKPLILRD | CSVAGWLLGN | PMCDEFLNVP | EWSYIVEKIN | PANDLCYPGK | FNDYEELKHL |
| 1553-15/A1 | DGVKPLILRD | CSVAGWLLGN | PMCDEFLNVP | EWSYIVEKIN | PANDLCYPGN | FNDYEELKHL |
| 2095-50/A1 | DGVKPLILRD | CSVAGWLLGN | PMCDEFLNVP | EWSYIVEKIY | PANDLCYPGN | FNDYEELKHL |
| 3982-2/A1 | DGVKPLILRD | CSVAGWLLGN | PMCDEFLDVP | EWSYIVEKIN | PANDLCYPGN | FNDYEELKHL |
| 3982-5/A1 | DGVKPLILRD | CSVAGWLLGN | PMCDEFLNV | EWSYIVEKIN | PTNDLCYPGN | FNDYEELKHL |
| 3982-7/A1 | DGVKPLILRD | CSVAGWLLGN | PMCDKFLNVP | EWSYIVEKIN | PTNDLCYPGN | FNDYEELKHL |
| 3982-8/A1 | DGVKPLILRD | CSVAGWLLGN | PMCDEFLNVP | EWSYIVEKIN | PTNDLCYPGN | FNDYEELKHL |
| 3982-9/A1 | DGVKPLILRD | CSVAGWLLGN | PMCDEFLNVP | EWSYIVEKIN | PANDLCYPGN | FNDYEELKHL |
| 3982-12/A1 | DGVKPLILRD | CSVAGWLLGN | PMCDEFLNVP | EWSYIVEKIN | PANDLCYPGN | FNDYEELKHL |
| 3982-20/A1 | DGVKPLILRD | CSVAGWLLGN | PMCDEFLNVP | EWSYIVEKIN | PANDLCYPGN | FNDYEELKHL |
| 3982-44/A1 | DGVKPLILRD | CSVAGWLLGN | PMCDEFLNVP | EWSYIVEKIN | PANDLCYPGN | FNDYEELKHL |
| 1553-2/B1 | GGVKPLILRD | CSVAGWLLGN | PMCDEFPNVS | EWSYIVEKIN | PANDLCYPGN | FNNYEELKHL |
| 1553-6/B1 | DGVKPLILRD | CSVAGWLLGN | PMCDEFPNVS | EWSYIVEKTN | PANDLCYPGN | FNNYEELKHL |
| 1553-13/B2 | DGVKPLILRD | CSVAGWLLGN | PMCDEFPNVS | EWSYIVEKIN | PANDLCYPGN | FNNYEELKHL |
| 1553-26/B2 | DGVKPLILRD | CSVAGWLLGN | PMCDEFPNVS | EWSYIVEKIN | PANDLCYPGN | FNNYEELKHL |
| 1553-28/B1 | DGVKPLILRD | CSVAGWLLGN | PMCDEFPNVS | EWSYIVEKIN | PANDLCYPGN | FNNYEELKHL |
| 2095-39/B2 | DGVKPLILRD | CSVAGWLLGN | PMCDEFPNVS | EWSYIVEKTN | PANDLCYPGN | FNNYEELKHL |
| 2095-46/B1 | DGVKPLILRD | CSVAGWLLGN | PMCDEFPNVS | EWSYIVEKIN | PANDLCYPGN | FNNYEELKHL |
| 2095-49/B1 | DGVKPLILRD | CSVAGWLLGN | PMCDEFPNVS | EWSYIVEKIN | PANDLCYPGN | FNNYEELKHL |
| 2095-65/B1 | DGVKPLILRG | CSVAGWLLGN | PMCDEFPNVS | EWSYIVEKIN | PANDLCYPGN | FNNYEELKHL |
| 2095-68/B2 | DGVKPLILRD | CSVAGWLLGN | PMCDEFPNVS | EWSYIVEKIN | PANDLCYPGN | FNNYEELKHL |
| 2095-70/B2 | DGVKPLILRD | CSVAGWLLGN | PMCDEFPNVS | EWSYIVEKIN | PANDLCYPGN | FNNYEELKHL |
| 2095-73/B2 | DGVKPLILRD | CSVAGWLLGN | PMCDEFPNVS | EWSYIVEKIN | PANDLCYPGN | FNNYEELKHL |
| 2095-75/B2 | DGVKPLILRD | CSVAGWLLGN | PMCDEFPNVS | EWSYIVEKIN | PANDLCYPGN | FNNYEELKHL |
| 3982-3/B1 | DGVKPLILRD | CSVAGWLLGN | PMCDEFPNVS | EWSYIVEKIN | PANDLCYPGN | FNNYEELKHL |
| 3982-4/B1 | DGVKPLILRD | CSVAGWLLGN | PMCDEFPNVS | EWSYIVEKIN | PANDLCYPGN | FNNYEELKHL |
| 3982-13/B1 | DGVKPLILRD | CSVAGWLLGN | PMCDEFPNVS | EWSYIVEKIN | PANDLCYPGN | FNNYEELKHL |
| 3982-14/B2 | DGVKPLILRD | CSVAGWLLGN | PMCDEFPNVS | EWSYIVEKIN | PANDLCYPGN | FNNYEELKHL |
| 3982-19/B3 | DGVKPLILRD | CSVAGWLLGN | PMCDEFLNVS | EWSYIVEKIN | PANDLCYPGN | FNNYEELKHL |
| 3982-21/B2 | DGVKPLILRD | CSVAGWLLGN | PMCDEFPNVS | EWSYIVEKIN | PANDLCYPGN | FNNYEELKHL |
| 3982-43/B1 | DGVKPLILRD | CSVAGWLLGN | PMCDEFPNVS | EWSYIVEKIN | PANDLCYPGN | FNNYEELKHL |
| 3982-50/B1 | DGVKPLILRD | CSVAGWLLGN | PMCDEFPNVS | EWSYIVEKTN | PANDLCYPGN | FNNYEELKHL |
| 3982-52/B1 | DGVKPLILRD | CSVAGWLLGN | PMCDEFPNVS | EWSYIVEKIN | PANDLCYPGN | FNNYEELKHL |
| 3982-55/A1 | DGVKPLILRD | CSVAGWLLGN | PMCDKFLNVP | EWSYIVEKIN | PANDLCYPGD | FNDYEELKHL |
| 3982-56/A1 | DGVKPLILRD | CSVAGWLLGN | PMCDEFPNVL | EWSYIVEKIN | PANDLCYPGN | FNDYEELKHL |
| 3982-78/B2 | DGVKPLILRD | CSVAGWLLGN | PMCDEFPNVS | EWSYIVEKIN | PANDLCYPGN | FNNYEELKHL |
| 4794-17/B | DGVKPLILRD | CSVAGWLLGN | PMCDEFPNVS | EWSYIVEKIN | PANDLCYPGN | FNNYEELKHL |
| 4794-18/B | DGVKPLILRD | CSVAGWLLGN | PMCDEFPNVS | EWSYIVEKIN | PANDLCYPGN | FNNYEELKHL |
| | ....\|....\| | ....\|....\| | ....\|....\| | ....\|....\| | ....\|....\| | ....\|....\| |
| | 125 | 135 | 145 | 155 | 165 | 175 |
| 1553-1/A1 | LSRINHFEKI | QIIPRNSWSD | HETS-GVSSA | CQYQGRSSFF | RNVVWLTKKD | NAYSTIKRSY |
| 1553-15/A1 | LSRINHFEKI | QIIPKGSWSD | HEAS-GVSSA | CPYQGRSSFF | RNVVWLTKKN | NAYPTIKKSY |
| 2095-50/A1 | LSRINHFEKI | QIIPKSSWSD | HEAS-GVSSA | CPYQGRSSFF | RNVVWLTKKD | NAYPTIKKSY |
| 3982-2/A1 | LSRINHFEKI | QIIPKNSWSD | HETS-GVSSA | CPYQGRSSFF | RNVVWLTKKN | TAYPTIKKSY |
| 3982-5/A1 | LSRINHFEKI | QIIPKNYWSD | HETS-GVSSA | CPYQGRPSFF | RNVVWLTKKN | NAYPTIKKSY |
| 3982-7/A1 | LSRINHFEKI | QIIPKNSWSD | HEAS-GVSSA | CPYQGRSSFF | RNVVWLTKKN | NAYPTIKKSY |
| 3982-8/A1 | LSRINHFEKI | QIIPKNSWSD | HEAS-GVSSA | CPYQGRSSFF | RNVVWLTKKN | NAYPTIKKSY |
| 3982-9/A1 | LSRINHFEKI | QIIPKNSWSD | HEAS-GVSSA | CPYQGRSSFF | RNVVWLTKKN | NXYPTIKKSY |
| 3982-12/A1 | LSRINHFEKI | QIIPKNSWSD | HEAS-GVSSA | CPYQGRSSFF | RNVVWLTKKN | NAYPTIKKSY |
| 3982-20/A1 | LSRINHFEKI | QIIPKNSWSD | HEAS-GVSSA | CPYQGRSSFF | RNVVWLTKKN | NAYPTIKKSY |
| 3982-44/A1 | LSRINHFEKI | QIIPKNSWSD | HEAS-GVSSA | CPYQGRSSFF | RNVVWLTKKD | NAYPTIKRSY |
| 1553-2/B1 | LSRINRFEKI | QIIPKSSWPD | HEASLGVSSA | CPYQGGPSFY | RNVVWLIKKN | DTYPTIKESY |
| 1553-6/B1 | LSRINRFEKI | KIIPKSSWPD | HEASLGVSSA | CPYQGEPSFY | RNVVWLIKKN | NTYPTIKESY |
| 1553-13/B2 | LSRINRFEKI | KIIPKSSWPD | HEASLGVSSA | CPYQRGPSFY | RNVVWLIKKN | NTYPTIKKSY |
| 1553-26/B2 | LSRINRFEKI | KIIPKSSWPD | HEASLGVSSA | CPYQGGPSFY | RNVVWLIKKN | NTYPTIKESY |
| 1553-28/B1 | LSRINRFEKI | QIIPKSSWPD | HEASLGVSSA | CPYQGEPSFY | RNVVWLIKKN | NTYPTIKESY |
| 2095-39/B2 | LSRINRFEKI | KIIPKSSWPD | HEASLGVSSA | CPYQGRPSFY | RNVVWLIKKN | NTYPTIKESY |
| 2095-46/B1 | LSRINRFEKI | QIIPKSSWPD | HEASLGVSSA | CPYQGEPSFY | RNVVWLIKKN | NTYPTIKENY |
| 2095-49/B1 | LSRINRFEKI | QIIPKSSWPD | HEASLGVSSA | CPYQGEPSFY | RNVVWLIKKN | NTYPTIKENY |
| 2095-65/B1 | LSRINRFEKI | QIIPKSSWPD | HEASLGVSSA | CPYQGEPSFY | RNVVWLIKKN | NTYPTIKESY |
| 2095-68/B2 | LSRINRFEKI | KIIPKSSWPD | HEASLGVSSA | CPYQGGPSFY | RNVVWLIKKN | NTYPTIKKSY |
| 2095-70/B2 | LSRINRFEKI | KIIPKXSWPD | HEASLGVSSA | CPYQGGPSFY | RNVVWLIKKN | NTYPTIKESY |
| 2095-73/B2 | LSRINRFEKI | KIIPKSSWPD | HEASLGVSSA | CPYQEGPSFY | RNVVWLIKKN | NTYPTIKKSY |
| 2095-75/B2 | LSRINRFEKI | KIIPKSSWPD | HEASLGVSSA | CPYQGGXSFY | RNVVWLIKKN | NTYPTIKESY |
| 3982-3/B1 | LSRINRFEKI | QIIPKSSWPD | HEASLGVSSA | CPYQGEPSFY | RNVVWLIKKN | NTYPTIKENY |
| 3982-4/B1 | LSRINRFEKI | QIIPKSSWPD | HEASLGVSSA | CPYQGEPSFY | RNVVWLIKKN | NTYPTIKESY |
| 3982-13/B1 | LSRINRFEKI | QIIPKSSWPD | HEASLGVSSA | CPYQGEPSFY | RNVVWLIKKN | NTYPTIKENY |
| 3982-14/B2 | LSRINRFEKI | KIIPKSSWPD | HEASLGVSSA | CPYQGGPSFY | RNVVWLIKKN | NTYPTIKESY |
| 3982-19/B3 | LSRINRFEKI | QIISKNSWPD | HEASLGVSAA | CPYQGGLSFY | RNVVWLIEKN | NTYPLIKKNY |
| 3982-21/B2 | LSRINRFEKI | KIIPKSSWPD | HEASLGVSSA | CPYQRGPSFY | RNVVWLIKKN | NTYPTIKKSY |
| 3982-43/B1 | LSRINRFEKI | QIIPKSSWPD | HEASLGVSSA | CPYQGGPSFY | RNVVWLIKKN | DTYPTIKESY |
| 3982-50/B1 | LSRINRFEKI | KIIPKSSWPD | HEASLGVSSA | CPYQGEPSFY | RNVVWLIKKN | NTYPTIKESY |
| 3982-52/B1 | LSRINRFEKI | QIIPKSSWPD | HEASLGVSSA | CPYQGGPSFY | RNVVWLIKKN | DTYPTIKESY |
| 3982-55/A1 | LSRINHFEKI | QIIPKNSWSD | HEAS-GVSSA | CPYQGRSSFF | RNVVWLTKKN | NAYPTIKKSY |
| 3982-56/A1 | LSRINHFEKI | QIIPKNSWSD | HEAS-GVSSA | CPYQRRSSFF | RNVVWLTKKN | NAYPTIKKSY |
| 3982-78/B2 | LSRINRFEKI | KIIPKSSWPD | HEASLGVSSA | CPYQGGPSFY | RNVVWLIKKN | NTYPTIKKSY |
| 4794-17/B | LSRINRFEKI | KIIPKSSWPD | HEASLGVSSA | CPYQGGPSFY | RNVVWLIKKN | NTYPTIKESY |
| 4794-18/B | LSRINRFEKI | KIIPKSSWPD | HEASLGVSSA | CPYQGGPSFY | RNVVWLTKKN | NTYPTIKKSY |
| | ....\|....\| | ....\|....\| | ....\|....\| | ....\|....\| | ....\|....\| | ....\|....\| |
| | 185 | 195 | 205 | 215 | 225 | 235 |
| 1553-1/A1 | NNTNQEDLLV | LWGIHHPNDA | AEQTRLYQNP | TTYISVGTST | LNQRLVPKIA | TRSKVNGQSG |
| 1553-15/A1 | NNTNQEDLLV | LWGIHHPNDA | AEQTRLYQNP | TTYISVGTST | LNQRLVPKIA | TRSKVNGQSG |
| 2095-50/A1 | NNTNQEDLLI | LWGIHHPNDA | AEQTRLYQNP | TTYISVGTST | LNQRLVPKIA | TRSKVNGQSG |
| 3982-2/A1 | NNTNQEDLLV | LWGIHHPNDA | AEQTRLYQNP | TTYISVGTST | LNQRLVPKIA | TRSKVNGQSG |
| 3982-5/A1 | NNTNQEDLLV | LWGIHHPNDA | AEQTRLYQNP | TTYISVGTST | LNQRLVPKIA | TRSKVNGQSG |
| 3982-7/A1 | NNTNQEDLLV | LWGIHHPNDA | AEQTRLYQNP | TTYISVGTST | LNQRLVPKIA | TRSKVNGQSG |
| 3982-8/A1 | NNTNQEDLLV | LWGIHHPNDA | AEQTRLYQNP | TTYISVGTST | LNQRLVPKIA | TRSKVNGQSG |
| 3982-9/A1 | NNTNQEDLLV | LWGIHHPNDA | AEQTKLYQNP | TTYISVGTST | LNQRLVPKIA | TRSKVNGQSG |
| 3982-12/A1 | NNTNQEDLLV | LWGIHHPNDE | AEQTRLYQNP | TTYISVGTST | LNQRLVPKIA | TRSKVNGQSG |
| 3982-20/A1 | NNTNQEDLLV | LWGIHHPNDA | AEQTRLYQNP | TTYISVGTST | LNQRLVPKIA | NRSKVNGQSG |
| 3982-44/A1 | NNTNQEDLLV | LWGIHHPNDA | AEQTRLYQNP | TTYISVGTST | LNQRLVPKIA | TRSKVNGQSG |
| 1553-2/B1 | HNTNQEDLLV | LWGIHHPNNE | EEQKRIYKNP | TTYVSVGTST | LNQRLVPKIA | TRSKVNGQSG |
| 1553-6/B1 | HNTNQEDLLV | LWGIHHPNDE | EEQTRIYKNP | TTYISVGTST | LNQRLVPKIA | TRSKVNGQSG |
| 1553-13/B2 | HNTNQEDLLV | LWGIHHPNDE | EEQTRIYKNP | TTYISVGTST | LNQRLVPKIA | TRSKVNGQSG |
| 1553-26/B2 | HNTNQEDLLV | LWGIHHPNDE | EEQTRIYKNP | TTYISIGTST | LNQRLVPKIA | TRSKVNGQRG |
| 1553-28/B1 | HNTNQEDLLV | LWGIHHPNDE | EEQKRIYKNP | TTYISVGTST | LNQRLVPKIA | TRPKVNGQSG |
| 2095-39/B2 | HNTNQEDLLV | LWGIHHPNDE | EEQTRIYKNP | TTYISIGTST | LNQRLIPKIA | TRSKVNGQSG |
| 2095-46/B1 | HNTNQEDLLV | LWGIHHPNDE | EEQKRIYKNP | TTYISVGTST | LNQRLVPKIA | TRPKVNGQSG |
| 2095-49/B1 | HNTNQEDLLV | LWGIHHPNDE | EEQKRIYKNP | TTYISVGTST | LNQRLVPKIA | TRPKVNGQSG |
| 2095-65/B1 | HNTNQEDLLV | LWGIHHPNDE | EEQKRIYKNP | TTYISVGTST | LNQRLVPKIA | TRPKVNGQSG |
| 2095-68/B2 | HNTNQEDLLV | LWGIHHPNDE | EEQTRIYKNP | TTYISVGTST | LNQRLVPKIA | TRSKVNGQSG |
| 2095-70/B2 | HNTNQEDLLV | LWGIHHPNDE | EEQTRIYKNP | TTYISIGTST | LNQRLVPKIA | TRSKVNGQSG |
| 2095-73/B2 | HNTNQEDLLV | LWGIHHPNDE | EEQTRIYKNP | TTYISVGTST | LNQRLVPKIA | TRSKVNGQSG |
| 2095-75/B2 | HNTNQEDLLV | LWGIHHPNDE | EEQTRIYKNP | TTYISIGTST | LNQRLVPKIA | TRSKVNGQSG |
| 3982-3/B1 | HNTNQEDLLV | LWGIHHPNDE | EEQKRIYKNP | TTYISVGTST | LTQRLVPKIA | TRPKVNGQSG |
| 3982-4/B1 | HNTNQEDLLV | LWGIHHPNDE | EEQKRIYKNP | TTYISVGTST | LNQRLVPKIA | TRPKVNGQSG |
| 3982-13/B1 | HNTNQEDLLV | LWGIHHPNDE | EEQKRIYKNP | TTYISVGTST | LNQRLVPKIA | TRPKVNGQSG |
| 3982-14/B2 | HNTNQEDLLV | LWGIHHPNDE | EEQTRIYKNP | NTYISVGTST | LNQRLVPKIA | TRSKVNGQSG |
| 3982-19/B3 | HNTNQEDLLV | LWGIHHPNDE | AEQXRLYKNS | TTYISVGTST | LXQRLVPKIA | TRPKVNGQSG |
| 3982-21/B2 | HNTNQEDLLV | LWGIHHPNDE | EEQTRIYKNP | TTYISVGTST | LNQRLVPKIA | TRSKVNGQSG |
| 3982-43/B1 | HNTNQEDLLV | LWGIHHPNDE | EEQKRIYKNP | TTYISVGTST | LNQRLVPKIA | TRSKVNGQSG |
| 3982-50/B1 | HNTNQEDLLV | LWGIHHPNDE | EEQTRIYKNP | TTYISVGTST | LNQRLVPKIA | TRSKVNGQSG |
| 3982-52/B1 | HNTNQEDLLV | LWGIHHPNDE | EEQKRIYKNP | TTYVSVGTST | LNQRLVPKIA | TRSKVNGQSG |
| 3982-55/A1 | NNTNQEDLLV | LWGIHHPNDA | AEQTMLYQNP | TTYVSVGTST | LNQRLVPKIA | TRSKVNGQSG |
| 3982-56/A1 | NNTNQEDLLV | LWGIHHPNDA | AEQTRLYQNP | TTYISVGTST | LNQRLVPKIA | TRSKVNGQSG |
| 3982-78/B2 | HNTNQEDLLV | LWGIHHPNDE | EEQTRIYKNP | TTYISVGTST | LNQRLVPKIA | TRSKVNGQSG |
| 4794-17/B | HNINKEDLLV | LWGIHHPNDE | EEQIRIYKNP | TTYISVGTST | LNQRLVPKIA | TRSKVNGQSG |
| 4794-18/B | HNINKEDLLV | LWGIHHPNDE | EEQIRIYKNP | TTYISVGTST | LNQRLVPKIA | TRSKVNGQSG |
| | ....\|....\| | ....\|....\| | ....\|....\| | ....\|....\| | ....\|....\| | ....\|....\| |
| | 245 | 255 | 265 | 275 | 285 | 295 |
| 1553-1/A1 | RMEFFWTILK | SNDAINFESN | GNFIAPENAY | KIVKKGDSTI | MKSELEYGNC | NTKCQTPIGA |
| 1553-15/A1 | RMEFFWTILK | SNDAINFESN | GNFIAPENAY | KIVKKGDSTI | MKSELEYGNC | NTKCQTPIGA |
| 2095-50/A1 | RMEFFWTILK | SNDAINFESN | GNFIAPENAY | KIVKKGDSTI | MKSELEYGNC | NTKCQTPIGA |
| 3982-2/A1 | RMEFFWTILK | SNDAINFESN | GNFIAPENAY | KIVKKGDSTI | MKSELEYGNC | NTKCQTPIGA |
| 3982-5/A1 | RMEFFWTILK | SNDAINFESN | GNFIAPENAY | KIVKKGDSTI | MKSELEYGNC | NTKCQTPIGA |
| 3982-7/A1 | RMEFFWTILK | SNDAINFESN | GNFIAPENAY | KIVKKGDSTI | MKSELEYGDC | NTKCQTPIGA |
| 3982-8/A1 | RMEFFWTILK | SNDAINFESN | GNFIAPENAY | KIVKKGDSTI | MKSELEYGDC | NTKCQTPIGA |
| 3982-9/A1 | RMEFFWTILK | SNDAINFESN | GNFIAPENAY | KIVKKGDSTI | MKSELEYGNC | NTKCQTPIGA |
| 3982-12/A1 | RMEFFWTILK | SNDAINFESN | GNFIAPENAY | KIVKKGDSTI | MKSELEYGNC | NTKCQTPIGA |
| 3982-20/A1 | RMEFFWTILK | SNDAINFESN | GNFIAPENAY | KIVKKGDSTI | MKSELEYGNC | NTKCQTPIGA |
| 3982-44/A1 | RMEFFWTILK | SNDAINFESN | GNFIAPENAY | KIVKKGDSTI | MKSELEYGNC | NTKCQTPIGA |
| 1553-2/B1 | RVEFFWTILK | SNDTINFESN | GNFIAPENAY | KIVKKGDSTI | MKSELEYGNC | STKCQTPIGA |
| 1553-6/B1 | RVEFFWTILK | SNDTINFESN | GNFIAPENAY | KIVKKGDSTI | MKSELEYGNC | STKCQTPVGA |
| 1553-13/B2 | RVEFFWTILK | SNDTINFESN | GNFIAPENAY | KIVKKGDSTI | MKSELEYGNC | NTKCQTPIGA |
| 1553-26/B2 | RVEFFWTILK | SNDTINFESN | GNFIAPENAY | KIVKKGDSTI | MKSELEYGNC | NTKCQTPIGA |
| 1553-28/B1 | RVEFFWTILK | SNDTINFESN | GNFIAPKNAY | KIVKKGSSTI | MKSELEYGNC | STKCQTPIGA |
| 2095-39/B2 | RVEFFWTILK | SNDTINFESN | GNFIAPENAY | KIVKKGDSTI | MKSELEYGNC | NTKCQTPIGA |
| 2095-46/B1 | RVEFFWTILK | SNDTINFESN | GNFIAPKNAY | KIVKKGSSTI | MKSELEYGNC | STKCQTPIGA |
| 2095-49/B1 | RVEFFWTILK | SNDTINFESN | GNFIAPKNAY | KIVKKGSSTI | MKSELEYGNC | STKCQTPIGA |
| 2095-65/B1 | RVEFFWTILK | SNDTINFESN | GNFIAPKNAY | KIVKKGSSTI | MKSELEYGNC | STKCQTPIGA |
| 2095-68/B2 | RVEFFWTILK | SNDTINFESN | GNFIAPENAY | KIVKKGDSTI | MKSELEHGNC | NTKCQTPIGA |
| 2095-70/B2 | RVEFFWTILK | SNDTINFESN | GNFIAPENAY | KIVKKGDSTI | MKSELEYGNC | NTKCQTPIGA |
| 2095-73/B2 | RVEFFWTILK | SNDTINFESN | GNFIAPENAY | KIVKKGDSTI | MKSELEYGNC | NTKCQTPIGA |
| 2095-75/B2 | RVEFFWTILK | SNDTINFESN | GNFIAPENAY | KIVKKGDSTI | MKSELEYGNC | NTKCQTPIGA |
| 3982-3/B1 | RVEFFWTILK | SNDTINFESN | GNFIAPKNAY | KIVKKGSSTI | MKSELEYGNC | STKCQTPIGA |
| 3982-4/B1 | RVEFFWTILK | SNDTINFESN | GNFIAPKNAY | KIVKKGSSTI | MKSELEYGNC | STKCQTPIGA |
| 3982-13/B1 | RVEFFWTILK | SNDTINFESN | GNFIAPKNAY | KIVKKGSSTI | MKSELEYGNC | STKCQTPIGA |
| 3982-14/B2 | RVEFFWTILK | SNDTINFESN | GNFIAPENAY | KIVKKGDSTI | MKSELEYGNC | STKCQTPIGA |
| 3982-19/B3 | RVEFFWTILK | SNDVINFESN | GNFIAPENAY | KIVKKGDSTI | MKSDLEYGNC | STKCQTPIGA |
| 3982-21/B2 | RVEFFWTILK | SNDTINFESN | GNFIAPENAY | KIVKKGDSTI | MKSELEYGNC | NTKCQTPIGA |
| 3982-43/B1 | RVEFFWTILK | SNDTINFESN | GNFIAPENAY | KIVKKGDSTI | MKSELEYGNC | STKCQTPIGA |
| 3982-50/B1 | RVEFFWTILK | SNDTINFESN | GNFIAPENAY | KIVKKGDSTI | MKSELEYGNC | STKCQTPVGA |
| 3982-52/B1 | RVEFFWTILK | SNDTINFESN | GNFIAPENAY | KIVKKGDSTI | MKSELEYGNC | STKCQTPIGA |
| 3982-55/A1 | RMEFFWTILK | SNDAINFESN | GNFIAPENAY | KIVKKGDSTI | MKSELEYGNC | NTKCQTPIGA |
| 3982-56/A1 | RMEFFWTILK | SNDAINFESN | GNFIAPENAY | KIVKKGDSTI | MKSELEYGNC | NTKCQTPIGA |
| 3982-78/B2 | RVEFFWTILK | SNDTINFESN | GNFIAPENAY | KIVKKGDSTI | MKSELEYGNC | NTKCQTPIGA |
| 4794-17/B | RVEFFWTILK | SNDTINFESN | GNFIAPENAY | KIVKKGDSTI | MKSELEYGNC | NTKCQTPIGA |
| 4794-18/B | RVEFFWTILK | SNDTINFESN | GNFIAPENAY | KIVKKGDSTI | MKSELEYGNC | NTKCQTPIGA |
| | ....\|....\| | ....\|....\| | ....\|....\| | ....\|....\| | ....\|....\| | ....\|....\| |
| | 305 | 315 | 325 | 335 | 345 | 355 |
| 1553-1/A1 | INSSMPFHNI | HPLTIGECPK | YVKSNRLVLA | TGLRNSPQEE | RRRKKRGLFG | AIAGFIEGGW |
| 1553-15/A1 | INSSMPFHNI | HPLTIGECPK | YVKSNRLVLA | TGLRNSPQGE | RRRKKRGLFG | AIAGFIEGGW |
| 2095-50/A1 | INSSMPFHNI | HPLTIGECPK | YVKSNRLVLA | TGLRNSPQGE | RRRKKRGLFG | AIAGFIEGGW |
| 3982-2/A1 | INSSMPFHNI | HPLTIGECPK | YVKSNRLVLA | TGLRNSPHGE | RRRKKRGLFG | AIAGFIEGGW |
| 3982-5/A1 | INSSMPFHNI | HPLTIGECPK | YVKSNRLVLA | TGLRNSPQGE | RRRKKRGLFG | AIAGFIEGGW |
| 3982-7/A1 | INSSMPFHNI | HPLTIGECPK | YVKSNRLVLA | TGLRNSPQGE | RRRKKRGLFG | AIAGFIEGGW |
| 3982-8/A1 | INSSMPFHNI | HPLTIGECPK | YVKSNRLVLA | TGLRNSPQGE | RRRKKRGLFG | AIAGFIEGGW |
| 3982-9/A1 | INSSMPFHNI | HPLTIGECPK | YVKSNRLVLA | TGLRNSPQGE | RRRKKRGLFG | AIAGFIEGGW |
| 3982-12/A1 | INSSMPFHNI | HPLTIGECPK | YVKSNRLVLA | TGLRNSPQGE | RRRKKRGLFG | AIAGFIEGGW |
| 3982-20/A1 | INSSMPFHNI | HPLTIGECPK | YVKSNRLVLA | TGLRNSPQGE | RRRKKRGLFG | AIAGFIEGGW |
| 3982-44/A1 | INSSMPFHNI | HPLTIGECPK | YVKSNRLVLA | TGLRNSPQGE | RRRKKRGLFG | AIAGFIEGGW |
| 1553-2/B1 | INTSMPFHNI | HPLTIGECPK | YVKSNRLVLA | TGLRNSPQGE | GRRKKRGLFG | AIAGFIEGGW |
| 1553-6/B1 | INSSMPFHNI | HPLTIGECPK | YVKSNRLVLA | TGLRNSPQGE | GRRKKRGLFG | AIAGFIEGGW |
| 1553-13/B2 | INSSMPFHNI | HPLTIGECPK | YVKSNRLVLA | TGLRNSPQGE | GRRKKRGLFG | AIAGFIEGGW |
| 1553-26/B2 | INSSMPFHNI | HPLTIGECPK | YVKSNRLVLA | TGLRNSPQGE | GRRKKRGLFG | AIAGFIEGGW |
| 1553-28/B1 | INSSMPFHNI | HPLTIGECPK | YVKSNRLVLA | TGLRNSPQGE | GRRKKRGLFG | AIAGFIEGGW |
| 2095-39/B2 | INSSMPFHNI | HPLTIGECPK | YVKSNRLVLA | TGLRNSPQGE | GRRKKRGLFG | AIAGFIEGGW |
| 2095-46/B1 | INSSMPFHNI | HPLTIGECPK | YVKSNRLVLA | TGLRNSPQGE | GRRKKRGLFG | AIAGFIEGGW |
| 2095-49/B1 | INSSMPFHNI | HPLTIGECPK | YVKSNRLVLA | TGLRNSPQGE | GRRKKRGLFG | AIAGFIEGGW |
| 2095-65/B1 | INSSMPFHNI | HPLTIGECPK | YVKSNRLVLA | TGLRNSPQGE | GRRKKRGLFG | AIAGFIEGGW |
| 2095-68/B2 | INSSMPFHNI | HPLTIGECPK | YVKSNRLVLA | TGLRNSPQGE | GRRKKRGLFG | AIAGFIEGGW |
| 2095-70/B2 | INSSMPFHNI | HPLTIGECPK | YVKSNRLVLA | TGLRNSPQGE | GRRKKRGLFG | AIAGFIEGGW |
| 2095-73/B2 | INSSMPFHNI | HPLTIGECPK | YVKSNRLVLA | TGLRNSPQGE | GRRKKRGLFG | AIAGFIEGGW |
| 2095-75/B2 | INSSMPFHNI | HPLTIGECPK | YVKSNRLVLA | TXLRNSPQGE | GRRKKRGLFG | AIAGFIEGGW |
| 3982-3/B1 | INSSMPFHNI | HPLTIGECPK | YVKSNRLVLA | TGLRNSPQGE | GRRKKRGLFG | AIAGFIEGGW |
| 3982-4/B1 | INSSMPFHNI | HPLTIGECPK | YVKSNRLVLA | TGLRNSPQGE | GRRKKRGLFG | AIAGFIEGGW |
| 3982-13/B1 | INSSMPFHNI | HPLTIGECPK | YVKSNRLVLA | TGLRNSPQGE | GRRKKRGLFG | AIAGFIEGGW |
| 3982-14/B2 | INSSMPFHNI | HPLTIGECPK | YVKSNRLVLA | TGLRNSPQEE | GRRKKRGLFG | AIAGFIEGGW |
| 3982-19/B3 | INSSMPFHNI | HPLTIGECPK | YVKSNRLVLA | TGLRNSPQGE | RRRKKRGLFG | AIAGFIEGGW |
| 3982-21/B2 | INSSMPFHNI | HPLTIGECPK | YVKSNRLVLA | TGLRNSPQGE | GRRKKRGLFG | AIAGFIEGGW |
| 3982-43/B1 | INTSMPFHNI | HPLTIGECPK | YVKSNRLVLA | TGLRNSPQGE | GRRKKRGLFG | AIAGFIEGGW |
| 3982-50/B1 | INSSMPFHNI | HPLTIGECPK | YVXSNRLVLA | TGLRNSPQGE | GRRKKRGLFG | AIAGFIEGGW |
| 3982-52/B1 | INTSMPFHNI | HPLTIGECPK | YVKSNRLVLA | TGLRNSPQGE | GRRKKRGLFG | AIAGFIEGGW |
| 3982-55/A1 | INSSMPFHNI | HPLTIGECPK | YVKSNRLVLA | TGLRNSPQGE | RRRKKRGLFG | AIAGFIEGGW |
| 3982-56/A1 | INSSMPFHNI | HPLTIGECPK | YVKSNRLVLA | TGLRNSPQGE | RRRKKRGLFG | AIAGFIEGGW |
| 3982-78/B2 | INSSMPFHNI | HPLTIGECPK | YVKSNRLVLA | TGLRNSPQGE | GRRKKRGLFG | AIAGFIEGGW |
| 4794-17/B | INSSMPFHNI | HPLTIGECPK | YVKSNRLVLA | TGLRNSPQGE | GRRKKRGLFG | AIAGFIEGGW |
| 4794-18/B | INSSMPFHNI | HPLTIGECPK | YVKSNRLVLA | TGLRNSPQGE | GRRKKRGLFG | AIAGFIEGGW |
| | ....\|....\| | ....\|....\| | ....\|....\| | ....\|....\| | ....\|....\| | ....\|....\| |
| | 365 | 375 | 385 | 395 | 405 | 415 |
| 1553-1/A1 | QGMVDGWYGY | HHSNEQGSGY | AADKESTQKA | IDGVTNKVNS | IIDKMNTQFE | AVGREFNNLE |
| 1553-15/A1 | QGMVDGWYGY | HHSNEQGSGY | AADKESTQKA | IDGVTNKVNS | IIDKMNTQFE | AVGREFNNLE |
| 2095-50/A1 | QGMVDGWYGY | HHSNEQGSGY | AADKESTQKA | IDGVTNKVNS | IIDKMNTQFE | AVGREFNNLE |
| 3982-2/A1 | QGMVDGWYGY | HHSNEQGSGY | AADKESTQKA | IDGVTNKVNS | IIDKMNTQFE | AVGREFNNLE |
| 3982-5/A1 | QGMVDGWYGY | HHSNEQGSGY | AADKESTQKA | IDGVTNKVNS | IIDKMNTQFE | AVGREFNNLE |
| 3982-7/A1 | QGMVDGWYGY | HHSNEQGSGY | AADKESTQKA | IDGVTNKVNS | IIDKMNTQFE | AVGREFNNLE |
| 3982-8/A1 | QGMVDGWYGY | HHSNEQGSGY | AADKESTQKA | IDGVTNKVNS | IIDKMNTQFE | AVGREFNNLE |
| 3982-9/A1 | QGMVDGWYGY | HHSNEQGSGY | AADKESTQKA | IDGVTNKVNS | IIDKMNTQFE | AVGREFNNLE |
| 3982-12/A1 | QGMVDGWYGY | HHSNEQGSGY | AADKESTQKA | IDGVTNKVNS | IIDKMNTQFE | AVGREFNNLE |
| 3982-20/A1 | QGMVDGWYGY | HHSNEQGSGY | AADKESTQKA | IDGVTNKVNS | IIDKMNTQFE | AVGREFNNLE |
| 3982-44/A1 | QGMVDGWYGY | HHSNEQGSGY | AADKESTQKA | IDGVTNKVNS | IIDKMNTQFE | AVGREFNNLE |
| 1553-2/B1 | QGMVDGWYGY | HHSNEQGSGY | AADKESTQKA | IDGVTNKVNS | IIDKMNTQFE | AVGREFNNLE |
| 1553-6/B1 | QGMVDGWYGY | HHSNXQGSGY | AADRESTQKA | IDGVTNKVNS | IIDKMNTQFE | AVGREFNNLE |
| 1553-13/B2 | QGMVDGWYGY | HHSNEQGSGY | AADKESTQKA | IDGVTNKVNS | IIDKMNTQFE | AVGREFNNLE |
| 1553-26/B2 | QGMVDGWYGY | HHSNEQGSGY | AADKESTQKA | IDGVTNKVNS | IIDKMNTQFE | AVGREFNNLE |
| 1553-28/B1 | QGMVDGWYGY | HHSNEQGTGY | AADKESTQKA | IDGVTNKVNS | IIDKMNTQFE | AVGREFNNLE |
| 2095-39/B2 | QGMVDGWYGY | HHSNEQGSGY | AADKESTQKA | IDGVTNKVNS | IIDKMNTQFE | AVGREFNNLE |
| 2095-46/B1 | QGMVDGWYGY | HHSNEQGTGY | AADKESTQKA | IDGVTNKVNS | IIDKMNTQFE | AVGREFNNLE |
| 2095-49/B1 | QGMVDGWYGY | HHSNEQGTGY | AADKESTQKA | IDGVTNKVNS | IIDKMNTQFE | AVGREFNNLE |
| 2095-65/B1 | QGMVDGWYGY | HHSNEQGTGY | AADKESTQKA | IDGVTNKVNS | IIDKMNTQFE | AVGREFNNLE |
| 2095-68/B2 | QGMVDGWYGY | HHSNEQGSGY | AADKESTQKA | IDGVTNKVNS | IIDKMNTQFE | AVGREFNNLE |
| 2095-70/B2 | QGMVDGWYGY | HHSNEQGSGY | AADKESTQKA | IDGVTNKVNS | IIDKMNTQFE | AVGREFNNLE |
| 2095-73/B2 | QGMVDGWYGY | HHSNEQGSGY | AADKESTQKA | IDGVTNKVNS | IIDKMNTQFE | AVGREFNNLE |
| 2095-75/B2 | QGMVDGWYGY | HHSNEQGSGY | AADKESTQKA | IDGVTNKVNS | IIDKMNTQFE | AVGREFNNLE |
| 3982-3/B1 | QGMVDGWYGY | HHSNEQGTGY | AADKESTQKA | IDGVTNKVNS | IIDKMNTQFE | AVGREFNNLE |
| 3982-4/B1 | QGMVDGWYGY | HHSNEQGTGY | AADKESTQKA | IDGVTNKVNS | IIDKMNTQFE | AVGREFNNLE |
| 3982-13/B1 | QGMVDGWYGY | HHSNEQGTGY | AADKESTQKA | IDGVTNKVNS | IIDKMNTQFE | AVGREFNNLE |
| 3982-14/B2 | QGMVDGWYGY | HHSNEQGSGY | AADKESTQKA | IDGVTNKVNS | IIDKMNTQFE | AVGREFNNLE |
| 3982-19/B3 | QGMVDGWYGY | HHSNEQGSGY | AADKESTQKA | IDGVTNKVNS | IIDKMNTQFE | AVGREFNNLE |
| 3982-21/B2 | QGMVDGWYGY | HHSNEQGSGY | AADKESTQKA | IDGVTNKVNS | IIDKMNTQFE | AVGREFNNLE |
| 3982-43/B1 | QGMVDGWYGY | HHSNEQGSGY | AADKESTQKA | INGVTNKVNS | IIDKMNTQFE | AVGREFNNLE |
| 3982-50/B1 | QGMVDGWYGY | HHSNEQGSGY | AADRESTQKA | IDGVTNKVNS | IIDKMNTQFE | AVGREFNNLE |
| 3982-52/B1 | QGMVDGWYGY | HHSNEQGSGY | AADKESTQKA | IDGVTNKVNS | IIDKMNTQFE | AVGREFNNLE |
| 3982-55/A1 | QGMVDGWYGY | HHSNEQGSGY | AADKESTQKA | IDGVTNKVNS | IIDKMNTQFE | AVGREFNNLE |
| 3982-56/A1 | QGMVDGWYGY | HHSNEQGSGY | AADKESTQKA | IDGVTNKVNS | IIDKMNTQFE | AVGREFNNLE |
| 3982-78/B2 | QGMVDGWYGY | HHSNEQGSGY | AADKESTQKA | IDGVTNKVNS | IIDKMNTQFE | AVGREFNNLE |
| 4794-17/B | QGMVDGWYGY | HHSNEQGSGY | AADKESTQKA | IDGVTNKVNS | IIDKMNTQFE | AVGREFNNLE |
| 4794-18/B | QGMVDGWYGY | HHSNEQGSGY | AADKESTQKA | IDGVTNKVNS | IIDKMNTQFE | AVGREFNNLE |
| | ....\|....\| | ....\|....\| | ....\|....\| | ....\|....\| | ....\|....\| | ....\|....\| |
| | 425 | 435 | 445 | 455 | 465 | 475 |
| 1553-1/A1 | RRIENLNKKM | EDGFLDVWTY | NAELLVLMEN | ERTLDFHDSN | VKNLYDKVRL | QLRDNAKELG |
| 1553-15/A1 | RRIENLNKKM | EDGFLDVWTY | NAELLVLMEN | ERTLDFHDSN | VKNLYDRVRL | QLRDNAKELG |
| 2095-50/A1 | RRIENLNKKM | EDGFLDVWTY | NAELLVLMEN | ERTLDFHDSN | VKNLYDKVRL | QLRDNAKELG |
| 3982-2/A1 | RRIENLNKKM | EDGFLDVWTY | NAELLVLMEN | ERTLDFHDSN | VKNLYDKVRL | QLRDNAKELG |
| 3982-5/A1 | RRIENLNKKM | EDGFLDVWTY | NAELLVLMEN | ERTLDFHDSN | VKNLYDKVRL | QLRDNAKELG |
| 3982-7/A1 | RRIENLNKKM | EDGFLDVWTY | NAELLVLMEN | ERTLDFHDSN | VKNLYDKVRL | QLRDNAKELG |
| 3982-8/A1 | RRIENLNKKM | EDGFLDVWTY | NAELLVLMEN | ERTLDFHDSN | VKNLYDKVRL | QLRDNAKELG |
| 3982-9/A1 | RRIENLNKKM | EDGFLDVWTY | NAELLVLMEN | ERTLDFHDSN | VKNLYDKVRL | QLRDNAKELG |
| 3982-12/A1 | RRIENLNKKM | EDGFLDVWTY | NAELLVLMEN | ERTLDFHDSN | VKNLYDKVRL | QLRDNAKELG |
| 3982-20/A1 | RRIENLNKKM | EDGFLDVWTY | NAELLVLMEN | ERTLDFHDSN | VKNLYDKVRL | QLRDNAKELG |
| 3982-44/A1 | RRIENLNKKM | EDGFLDVWTY | NAELLVLMEN | ERTLDFHDSN | VKNLYDKVRL | QLRDNAKELG |
| 1553-2/B1 | KRIENLNKKM | EDGFLDVWTY | NAELLVLMEN | ERTLDFHDSN | VRNLYDKVRL | QLRDNAKELG |
| 1553-6/B1 | KRIENLNKKM | EDGFLDVWTY | NAELLVLMEN | ERTLDFHDSN | VKNLYDKVRL | QLRDNAKELG |
| 1553-13/B2 | KRIENLNKKM | EDGFLDVWTY | NAELLVLMEN | ERTLDFHDSN | VKNLYDKVRL | QLRDNAKELG |
| 1553-26/B2 | KRIENLNKKM | EDGFLDVWTY | NAELLVLMEN | ERTLDFHDSN | VKNLYDKVRL | QLRDNAKELG |
| 1553-28/B1 | KRIENLNKKM | EDGFLDVWTY | NAELLVLMEN | ERTLDFHDSN | VRNLYDKVRL | QLRDNAKELG |
| 2095-39/B2 | KRIENLNKKM | EDGFLDVWTY | NAELLVLMEN | ERTLDFHDSN | VKNLYDKVRL | QLRDNAKELG |
| 2095-46/B1 | KRIENLNKKM | EDGFLDVWTY | NAELLVLMEN | ERTLDFHDSN | VRNLYDKVRL | QLRDNAKELG |
| 2095-49/B1 | KRIENLNKKM | EDGFLDVWTY | NAELLVLMEN | ERTLDFHDSN | VRNLYDKVRL | QLRDNAKELG |
| 2095-65/B1 | KRIENLNKKM | EDGFLDVWTY | NAELLVLMEN | ERTLDFHDSN | VRNLYDKVRL | QLRDNAKELG |
| 2095-68/B2 | KRIENLNKKM | EDGFLDVWTY | NAELLVLMEN | ERTLDFHDSN | VKNLYDKVRL | QLRDNAKELG |
| 2095-70/B2 | KRIENLNKKM | EDGFLDVWTY | NAELLVLMEN | ERTLDFHDSN | VKNLYDKVRL | QLRDNAKELG |
| 2095-73/B2 | KRIENLNKKM | EDGFLDVWTY | NAELLVLMEN | ERTLDFHDSN | VKNLYDKVRL | QLRDNAKELG |
| 2095-75/B2 | KRIENLNKKM | EDGFLDVWTY | NAELLVLMEN | ERTLDFHDSN | VKNLYDKVRL | QLRDNAKELG |
| 3982-3/B1 | KRIENLNKKM | EDGFLDVWTY | NAELLVLMEN | ERTLDFHDSN | VRNLYDKVRL | QLRDNAKELG |
| 3982-4/B1 | KRIENLNKKM | EDGFLDVWTY | NAELLVLMEN | ERTLDFHDSN | VRNLYDKVRL | QLRDNAKELG |
| 3982-13/B1 | KRIENLNKKM | EDGFLDVWTY | NAELLVLMEN | ERTLDFHDSN | VRNLYDKVRL | QLRDNAKELG |
| 3982-14/B2 | KRIENLNKKM | EDGFLDVWTY | NAELLVLMEN | ERTLDFHDSN | VKNLYDKVRL | QLRDNAKELG |
| 3982-19/B3 | RRIENLNKKM | EDGFLDVWTY | NAELLVLMEN | ERTLDFHDSN | VKNLYDKVRL | QLRDNAKELG |
| 3982-21/B2 | KRIENLNKKM | EDGFLDVWTY | NAELLVLMEN | ERTLDFHDSN | VKNLYDKVRL | QLRDNAKELG |
| 3982-43/B1 | KRIENLNKKM | EDGFLDVWTY | NAELLVLMEN | ERTLDFHDSN | VRNLYDKVRL | QLRDNAKELG |
| 3982-50/B1 | KRIENLNKKM | EDGFLDVWTY | NAELLVLMEN | ERTLDFHDSN | VKNLYDKVRL | QLRDNAKELG |
| 3982-52/B1 | KRIENLNKKM | EDGFLDVWTY | NAELLVLMEN | ERTLDFHDSN | VRNLYDKVRL | QLRDNAKELG |
| 3982-55/A1 | RRIENLNKKM | EDGFLDVWTY | NAELLVLMEN | ERTLDFHDSN | VKNLYDKVRL | QLRDNAKELG |
| 3982-56/A1 | RRIENLNKKM | EDGFLDVWTY | NAELLVLMEN | ERTLDFHDSN | VKNLYDKVRL | QLRDNAKELG |
| 3982-78/B2 | KRIENLNKKM | EDGFLDVWTY | NAELLVLMEN | ERTLDFHDSN | VKNLYDKVRL | QLRDNAKELG |
| 4794-17/B | KRIENLNKKM | EDGFLDVWTY | NAELLVLMEN | ERTLDFHDSN | VKNLYDKVRL | QLRDNAKELG |
| 4794-18/B | KRIENLNKKM | EDGFLDVWTY | NAELLVLMEN | ERTLDFHDSN | VKNLYDKVRL | QLRDNAKELG |
| | ....\|....\| | ....\|....\| | ....\|....\| | ....\|....\| | ....\|....\| | ....\|....\| |
| | 485 | 495 | 505 | 515 | 525 | 535 |
| 1553-1/A1 | NGCFEFYHRC | DNECMESVRN | GTYDYPQYSE | EARLKREEIS | GVKLESIGTY | QILSIYSTVA |
| 1553-15/A1 | NGCFEFYHRC | DNECMESVRN | GTYDYPQYSE | EARLKREEIS | GVKLESIGTY | QILSIYSTVA |
| 2095-50/A1 | NGCFEFYHRC | DNECMESVRN | GTYDYPQYSE | EARLKREEIS | GVKLESIGTY | QILSIYSTVA |
| 3982-2/A1 | NGCFEFYHRC | DNECMESVRN | GTYDYPQYSE | EARLKREEIS | GVKLESIGTY | QILSIYSTVA |
| 3982-5/A1 | NGCFEFYHRC | DNECMESVRN | GTYDYPQYSE | EARLKREEIS | GVKLESIGTY | QILSIYSTVA |
| 3982-7/A1 | NGCFEFYHRC | DNECMESVRN | GTYDYPQYSE | EARLKREEIS | GVKLESIGTY | QILSIYSTVA |
| 3982-8/A1 | NGCFEFYHRC | DNECMESVRN | GTYDYPQYSE | EARLKREEIS | GVKLESIGTY | QILSIYSTVA |
| 3982-9/A1 | NGCFEFYHRC | DNECMESVRN | GTYDYPQYSE | EARLKREEIS | GVKLESIGTY | QILSIYSTVA |
| 3982-12/A1 | NGCFEFYHRC | DNECMESVRN | GTYDYPQYSE | EARLKREEIS | GVKLESIGTY | QILSIYSTVA |
| 3982-20/A1 | NGCFEFYHRC | DNECMESVRN | GTYDYPQYSE | EARLKREEIS | GVKLESIGTY | QILSIYXTVA |
| 3982-44/A1 | NGCFEFYHRC | DNECMESVRN | GTYDYPQYSE | EARLKREEIS | GVKLESIGTY | QILSIYSTVA |
| 1553-2/B1 | NGCFEFYHRC | DNECMESVRN | GTYDYPQYSE | EARLKREEIS | GVKLESIGTY | QILSIYSTVA |
| 1553-6/B1 | NGCFEFYHRC | DNECIESVRN | GTYDYPQYSE | EARLKREEIS | GVKLESIGTY | QILSIYSTVA |
| 1553-13/B2 | NGCFEFYHRC | DNECMESVRN | GTYDYPQYSE | EARLKREEIS | GVKLESIGTY | QILSIYSTVA |
| 1553-26/B2 | NGCFEFYHRC | DNECMESVRN | GTYDYPQYSE | EARLKREEIS | GVKLESIGTY | QILSIYSTVA |
| 1553-28/B1 | NGCFEFYHKC | DNECMESVRN | GTYDYPQYSK | EARLKREEIS | GVKLESIGTY | QILSIYSTVT |
| 2095-39/B2 | NGCFEFYHRC | DNECMESVRN | GTYDYPQYSE | EARLKREEIS | GVKLESIGTY | QILSIYSTVA |
| 2095-46/B1 | NGCFEFYHKC | DNECMESVRN | GTYDYPQYSK | EARLKREEIS | GVKLESIGTY | QILSIYSTVA |
| 2095-49/B1 | NGCFEFYHKC | DNECMESVRN | GTYDYPQYSK | EARLKREEIS | GVKLESIGTY | QILSIYSTVA |
| 2095-65/B1 | NGCFEFYHKC | DNECMESVRN | GTYDYPQYSK | EARLKREEIS | GVKLESIGTY | QILSIYSTVA |
| 2095-68/B2 | NGCFEFYHRC | DNECMESVRN | GTYDYPQYSE | EARLNREEIS | GVKLESIGTY | QILSIYSTVA |
| 2095-70/B2 | NGCFEFYHRC | DNECMESVRN | GTYDYPQYSE | EARLKREEIS | GVKLESIGTY | QILSIYSTVA |
| 2095-73/B2 | NGCFEFYHRC | DNECMESVRN | GTYDYPQYSE | EARLKREEIS | GVKLESIGTY | QILSIYSTVA |
| 2095-75/B2 | NGCFEFYHRC | DNECMESVRN | GTYDYPQYSE | EARLKREEIS | GVKLESIGTY | QILSIYSTVA |
| 3982-3/B1 | NGCFEFYHKC | DNECMESVRN | GTYDYPQYSK | EARLKREEIS | GVKLESIGTY | QILSIYSTVA |
| 3982-4/B1 | NGCFEFYHKC | DNECMESVRN | GTYDYPQYSK | EARLKREEIS | GVKLESIGTY | QILSIYSTVA |
| 3982-13/B1 | NGCFEFYHKC | DNECMESVRN | GTYDYPQYSK | EARLKREEIS | GVKLESIGTY | QILSIYSTVA |
| 3982-14/B2 | NGCFEFYHRC | DNECMESVRN | GTYDYPQYSE | EARLKREEIS | GVKLESIGTY | QILSIYSTVA |
| 3982-19/B3 | NGCFEFYHRC | DNECMESVRN | GTYDYPQYSE | EARLKREEIS | GAKLESIGTY | QIXSIYSTVA |
| 3982-21/B2 | NGCFEFYHRC | DNECMESVKN | GTYDYPQYSE | EARLKREEIS | GVKLESIGTY | QILSIYSTVA |
| 3982-43/B1 | NGCFEFYHRC | DNECMESVRN | GTYDYPQYSK | EARLKREEIS | GVKLESIGTY | QILSIYSTVA |
| 3982-50/B1 | NGCFEFYHRC | DNECIESVRN | GTYDYPQYSE | EARLKREEIS | GVKLESIGTY | QILSIYSTVA |
| 3982-52/B1 | NGCFEFYHRC | DNECMESVRN | GTYDYPQYSE | EARLKREEIS | GVKLEXIGTY | QILSIYSTVA |
| 3982-55/A1 | NGCFEFYHRC | DNECMESVRN | GTYDYPQYSE | EARLKREEIS | GVKLESIGTX | QILSIYSTVA |
| 3982-56/A1 | NGCFEFYHRC | DNECMESVRN | GTYDYPQYSE | EARLKREEIS | GVKLESIGTX | QIXSIYSTVA |
| 3982-78/B2 | NGCFEFYHRC | DNECMESVRN | GTYDYPQYSE | EARLKREEIS | GVKLESIGTY | QIL*IYSTVA |
| 4794-17/B | NGCFEFYHRC | DNECMESVRN | GTYDYPQYSE | EARLKREEIS | GVKLESIGTY | QILSIYSTVA |
| 4794-18/B | NGCFEFYHRC | DNECMESVRN | GTYDYPQYSE | EARLKREEIS | GVKLESIGTY | QILSIYSTVA |
| | ....\|....\| | ....\|....\| | ....\|.... | | | |
| | 545 | 555 | 565 | | | |
| 1553-1/A1 | SSLALAIMVA | GLFLWMCSNG | SLQCRICI | | | |
| 1553-15/A1 | SSLALAIMVA | GLFLWMCSNG | SLQCRICI | | | |
| 2095-50/A1 | SSLALAIMVA | GLFLWMCSNG | XLQCRICI | | | |
| 3982-2/A1 | SSLALAIMVX | GLFLWMCSNG | SLQCRICI | | | |
| 3982-5/A1 | SSLALAIMVA | GLFLWMCSNG | SLQCRICI | | | |
| 3982-7/A1 | SSLALAIMVA | GLFLWMCSNG | XLQCRICI | | | |
| 3982-8/A1 | SSLALAIMVX | GLFLWMCSNG | SLQCRICI | | | |
| 3982-9/A1 | SSLALAIMVA | GLFLWMCSNG | SLQCRICI | | | |
| 3982-12/A1 | SSLALAIXVA | GLFLWMCSNG | SLQCRICI | | | |
| 3982-20/A1 | SSLALAIMVA | GLFLWMCSNG | SLQCRICI | | | |
| 3982-44/A1 | SSLALAIXVA | GLFLWMCSNG | SLQCRICI | | | |
| 1553-2/B1 | SSLALAIMVA | GLFLWMCSNG | SLQCRICI | | | |
| 1553-6/B1 | SSLALAIIVA | GLFLWMCSNG | SLQCRICI | | | |
| 1553-13/B2 | SSLALAIMMA | GLFLWMCSNG | SLQCRICI | | | |
| 1553-26/B2 | SSLALAIMMA | GLFLWMCSNG | SLQCRICI | | | |
| 1553-28/B1 | SSLALAIMVA | GLSLWMCSNG | SLQCRICI | | | |

TABLE D
The sequence SEQ ID NO: 138 is shown, which correspond to the
variant sequence as set forth in SEQ ID NO: 47 starting with the N-
terminal amino acid D17, wherein the numbering of said first N-
terminal amino acid position (D17) refers to the amino acid position
17 as exemplarily given in SEQ ID NO 8:

```
                10 20 30 40 50 60
(SEQ ID NO: 47) DQIC IGYHANNSTE QVDTIMEKNV TVTHAQDILE KTHNGKLCDL
                70 80 90 100 110 120
DGVKPLILRD CSVAGWLLGN PMCDEFPNVS EWSYIVEKIN PANDLCYPGN FNNYEELKHL
              130 140 150 160 170 180
LSRINRFEKI QIIPKSSWPD HEASLGVSSA CPYQGGPSFY RNVVWLIKKN NTYPTIKESY
              190 200 210 220 230 240
HNTNQEDLLV LWGIHHPNDE EEQTRIYKNP TTYISVGTST LNQRLVPKIA TRSKVNGQSG
              250 260 270 280 290 300
RVEFFWTILK SNDTINFESN GNFIAPENAY KIVKKGDSTI MKSELEYGNC NTKCQTPIGA
              310 320 330 340 350 360
INSSMPFHNI HPLTIGECPK YVKSNRLVLA TGLRNSPQGE GRRKKRGLFG AIAGFIEGGW
              370 380 390 400 410 420
QGMVDGWYGY HHSNEQGSGY AADKESTQKA IDGVTNKVNS IIDKMNTQFE AVGREFNNLE
              430 440 450 460 470 480
KRIENLNKKM EDGFLDVWTY NAELLVLMEN ERTLDFHDSN VKNLYDKVRL QLRDNAKELG
              490 500 510 520 530 540
NGCFEFYHRC DNECMESVRN GTYDYPQYSE EARLKREEIS GVKLESIGTY QILSIYSTVA
              550 560
SSLALAIMVA GLFLWMCSNG SLQCRICI
```

[0351] It is understood that the sequence provided in Table D (SEQ ID NO: 138) is a variant of the sequence SEQ ID NO: 47 starting with amino acid D17 and having the full length C-terminal sequence, as mentioned herein.

1. A method of treating or preventing infections with H5N1 virus of a different clade comprising administering to a subject an H5 protein of clade 1 H5N1 virus, wherein said H5 protein comprises a polypeptide sequence having at least 98% sequence identity with the polypeptide sequence of SEQ ID NO:1, wherein said H5N1 virus of a different clade is a H5N1 virus comprising:
a. a polynucleotide encoding a second H5 protein of influenza virus, wherein said second H5 protein encodes an amino acid sequence comprising:
i. the amino acids 113D, 126H, 145(−), 156R, 160F, 167T, and 181N, wherein the modification 145(−) means that amino acid position 145 of H5 is deleted, or
ii. the amino acids 87P, 145L, 172T, 201E, 206I, 208K, 254T, 341G and 421K, or
iii. the amino acids 145L, 172T, and 254V,
wherein the numbering of the amino acid positions of the second H5 protein of group (i), (ii), and (iii) refers to the amino acid position as exemplarily given in SEQ ID NO:8, or
iv. an amino acid sequence which is at least 95%, preferably at least 96%, more preferably at least 97%, still more preferably at least 98%, yet more preferably at least 99%, or in particular preferred 100% homolog with any one of the sequences as set forth in SEQ ID NOs: 62 to 137 or 9 to 46; or
b. a second H5 protein of influenza virus, wherein said second H5 protein comprises an amino acid sequence which is at least 95%, preferably at least 96%, more preferably at least 97%, still more preferably at least 98%, yet more preferably at least 99%, or in particular preferred 100% homolog with any one of the sequences as set forth in SEQ ID NOs: 62 to 137.

2. The method according to claim 1, wherein said H5 protein comprises a polypeptide sequence having at least 98.1%, preferably at least 98.2%, more preferably at least 98.3%, and most preferably at least 98.4% sequence identity with the polypeptide sequence of SEQ ID NO:1.

3. The method according to claim 1, wherein said H5 protein has the amino acid 223N and the modification 328K+, wherein numbering of the amino acid positions of the H5 protein refers to the amino acid position as exemplarily given in SEQ ID NO:2, and wherein the modification 328K+ means that at amino acid position 328 of the H5 protein a second Lysine (K+) is inserted.

4. The method according to claim 1, wherein such H5 protein has the amino acid 94N.

5. The method according to claim 1, wherein such H5 protein has the amino acid 120N.

6. The method according to claim 1, wherein such H5 protein has the amino acid 155N.

7. The method according to claim 1, wherein such H5 protein has one or more of the following amino acid clusters selected from the group consisting of:
a. aa 93-95: GNF
b. aa 123-125: SDH
c. aa 128-130: SSG
d. aa 138-140: GSS
e. aa 226-228: MDF
f. aa 270-272: EVE
g. aa 309-311: NKL.

8. The method according to claim 1, wherein such H5 protein comprises a peptide comprising:
a. the amino acid sequences of SEQ ID NO:5; SEQ ID NO:6 or SEQ ID NO:7; or
b. any peptide that has at least 85% sequence homology to the polypeptide of i) and that comprises hemagglutinin inhibition in a standard hemagglutinin inhibition assay; or
c. any part of the polypeptides of i) or ii) comprising at least 8 contiguous amino acids of any of such peptides of i) or ii) and wherein any of such peptide comprises hemagglutinin inhibition in a standard hemagglutinin inhibition assay; or
d. any peptide of i), ii) or iii) having one of the amino acids 36T, 36K, 83A, 83T, 83D, 86A, 86V, 120S, 155S, 156A, 156T, 189R, 189K, 212K, 212R, 212E, 263A or 263T; or
e. any peptide of i), ii), iii) or iv) having one or more of the following amino acid clusters selected from the group consisting of:
i. aa 93-95: GNF
ii. aa 123-125: SDH
iii. aa 128-130: SSG
iv. aa 138-140: GSS
v. aa 226-228: MDF
vi. aa 270-272: EVE
vii. aa 309-311: NKL.

9. The method according to claim 1, wherein such H5 protein comprises the amino acid sequence of SEQ ID NO:5.

10. The method according to claim 1, wherein such H5 protein is recombinantly expressed and/or produced by a baculovirus expression system, preferably in cultured insect cells.

11. The method according to claim 1, wherein said H5N1 virus of a different clade is a clade 2.2.1 H5N1 virus.

12. The method according to claim 1, wherein said H5N1 virus of a different clade is a H5N1 virus of North African origin.

13. A method of treating or preventing infections with H5N1 virus of a different clade comprising administering to a subject an H5 protein of clade 1 H5N1 virus, wherein said H5 protein comprises a polypeptide sequence having at least 98% sequence identity with the polypeptide sequence of SEQ ID NO:1, wherein said H5N1 virus of a different clade is a H5N1 virus comprising:
a. a polynucleotide encoding a second H5 protein comprising:
i. the amino acids 87L, 113D, 126H, 145(−), 156R, 160F, 167T, and 181N, or
ii. the amino acids 87P, 113N, 126R, 145L, 160Y, 172T, 181H, 201E, 206I, 208K, 254T, 341G and 421K, or
iii. the amino acids 87L, 113N, 126R, 145L, 156G, 160Y, 172T, 181H, and 254V,
wherein the numbering of the amino acid positions of the second H5 protein of group (i), (ii), and (iii) refers to the amino acid position as exemplarily given in SEQ ID NO:8; or
iv. any one of the amino acid sequences of SEQ ID NOs: 62 to 137; or
b. a second H5 protein comprising any peptide that has at least 85%, preferably at least 95%, even more preferably at least 96%, even more preferably at least 97%, even more preferably at least 98%, even more preferably at least 99%, most preferably 100% sequence homology to the polypeptide of i) and that comprises hemagglutinin inhibition in a standard hemagglutinin inhibition assay; or
c. a second H5 protein comprising any part of the polypeptides of a.i) or a.ii) comprising at least 334 contiguous amino acids of any of such peptides of a.i) or a.ii) and wherein any of such peptide comprises hemagglutinin inhibition in a standard hemagglutinin inhibition assay; or
d. a second H5 protein of influenza virus, wherein said second H5 protein comprises a contiguous amino acid sequence which has at least 95% even more preferably at least 96%, even more preferably at least 97%, even more preferably at least 98%, even more preferably at least 99%, most preferably 100% sequence identity with any one of the sequences as set forth in SEQ ID NOs: 62 to 137.

14. The method according to claim 13, wherein said H5N1 virus of a different clade comprising a second H5 protein comprises:
a. the amino acids 87L, 113D, 126H, 145(−), 156R, 160F, 167T, and 181N, or
b. the amino acids 87P, 113N, 126R, 145L, 160Y, 172T, 181H, 201E, 206I, 208K, 254T, 341G and 421K, or
c. the amino acids 87L, 113N, 126R, 145L, 156G, 160Y, 172T, 181H, and 254V; or
d. a peptide comprising:
i. any one of the amino acid sequences of SEQ ID NOs: 62 to 137, or
ii. any peptide that has at least 85%, preferably at least 95%, even more preferably at least 96%, even more preferably at least 97%, even more preferably at least 98%, even more preferably at least 99%, most preferably 100% sequence homology to the polypeptide of i) and that comprises hemagglutinin inhibition in a standard hemagglutinin inhibition assay, or
iii. any part of the polypeptides of i) or ii) comprising at least 334 contiguous amino acids of any of such peptides of i) or ii) and wherein any of such peptide comprises hemagglutinin inhibition in a standard hemagglutinin inhibition assay; or
e. a contiguous amino acid sequence which has at least 95% even more preferably at least 96%, even more preferably at least 97%, even more preferably at least 98%, even more preferably at least 99%, most preferably 100% sequence identity with any one of the sequences as set forth in SEQ ID NOs: 62 to 137.

15. The method according to claim 13, wherein said H5N1 virus of a different clade is a H5N1 virus comprising:
a. a polynucleotide encoding a second H5 protein of influenza virus, wherein said second H5 protein comprises an amino acid sequence which is at least 95%, preferably at least 96%, more preferably at least 97%, still more preferably at least 98%, yet more preferably at least 99%, or in particular preferred 100% homolog with any one of the sequences as set forth in SEQ ID NOs: 62 to 99; or
b. a second H5 protein of influenza virus, wherein said second H5 protein comprises an amino acid sequence which is at least 95%, preferably at least 96%, more preferably at least 97%, still more preferably at least 98%, yet more preferably at least 99%, or in particular preferred 100% homolog with any one of the sequences as set forth in SEQ ID NOs: 62 to 99.

16. The method according to claim 13, wherein said H5N1 virus of a different clade comprises:
a. a polynucleotide encoding a second H5 protein comprising an amino acid sequence which is at least 95%, preferably at least 96%, more preferably at least 97%, still more preferably at least 98%, yet more preferably at least 99%, or in particular preferred 100% homolog with any one of the sequences as set forth in SEQ ID NOs: 68, 73, 106, or 111, and wherein said second H5 protein comprising the amino acid sequence set forth in any of SEQ ID NOs: 73 or 111 are in particular more preferred; or
b. a second H5 protein comprising an amino acid sequence which is at least 95%, preferably at least 96%, more preferably at least 97%, still more preferably at least 98%, yet more preferably at least 99%, or in particular preferred 100% homolog with any one of the sequences as set forth in SEQ ID NOs: 68, 73, 106, or 111,
wherein such second H5 protein comprising the amino acid sequence set forth in any of SEQ ID NOs:73 or 111 are in particular more preferred.

17. The method according to claim 1, for use in treating or preventing infections, wherein said infections comprise:
a. a Subclade A H5N1 virus of North African origin, namely an infection with a H5N1 virus comprising a polynucleotide encoding a second H5 protein, wherein
i. said second H5 protein comprises the amino acids according to (a.i.) of claim 1, or
ii. said second H5 protein comprises any one of the sequences as set forth in SEQ ID NOs: 62 to 72, 100 to 110, 9 to 19, or 95 or 96, 133 or 134, 42 or 43; or
b. a Subclade B H5N1 virus of North African origin, namely an infection with a H5N1 virus comprising a polynucleotide encoding a second H5 protein, wherein
i. said second H5 protein comprises the amino acids according to (a.ii) or (a.iii) of claim 1, or
ii. said second H5 protein comprises any one of the sequences as set forth in SEQ ID NOs: 82 to 94, 111 to 132, 20 to 41, or 97 to 99, 135 to 137, or 44 to 46.

18. The method according claim 1, for use treating or preventing infections, wherein said infections comprise:
a. a Subclade A H5N1 virus of North African origin, namely an infection with a H5N1 virus comprising a second H5 protein wherein i. said second H5 protein comprises the amino acids according to
(a.i) of claim 1, or
ii. said second H5 protein comprises any one of the sequences as set forth in SEQ ID NOs: 62 to 72, 100 to 110, or 95 or 96, 133 or 134; or
b. a Subclade B H5N1 virus of North African origin, namely an infection with a H5N1 virus comprising a second H5 protein wherein
i. said second H5 protein comprises the amino acids according to (a.ii) or (a.iii) of claim 1, or
ii. said second H5 protein comprises any one of the sequences as set forth in SEQ ID NOs: 82 to 94, 111 to 132, or 97 to 99, 135 to 137.

19. A method of treating or preventing infections with H5N1 virus of a different clade comprising administering to a subject a combination of a H5 protein and an inactivated Newcastle disease virus, wherein said H5 protein comprises a polypeptide sequence having at least 98% sequence identity with the polypeptide sequence of SEQ ID NO:1.

20. The method of claim 19, wherein the inactivated Newcastle disease virus is an inactivated whole Newcastle disease virion.

21. The method of claim 19, wherein the inactivated Newcastle disease virus is an inactivated Newcastle disease virus obtained by inactivation of a Newcastle disease virus comprising a RNA polynucleotide having at least 70%, preferably at least 80%, more preferably at least 90%, still more preferably at least 95% or in particular 100% sequence identity with a RNA copy of the polynucleotide set forth in SEQ ID NO: 139, which has been inactivated.

22. The method of claim 19, wherein the Newcastle disease virus is a Newcastle disease LaSota strain virus.

23. The method of claim 19, wherein the Newcastle Disease Virus is inactivated with a reagent selected from the group consisting of Formaldehyde, BEI, Beta-Propio-Lactone (BPL), and combinations thereof.

24. A method of treating or preventing infections with H5N1 virus of a clade other than clade 1, comprising administration to a subject a vaccine comprising:
a. an H5 protein comprising a polypeptide sequence having at least 98% sequence identity with the polypeptide sequence of SEQ ID NO:1, and
b. a pharmaceutical acceptable carrier and/or excipient.

25. The method according to claim 24, wherein the excipient is one or more adjuvants.

26. The method according to claim 25, wherein the adjuvant is an Emulsigen-based adjuvant.

27. The method according to claim 24, wherein the vaccine comprises one or more further antigens.

28. The method according to claim 27, wherein the one or more further antigen is an antigen of a poultry pathogen.

29. The method according to claim 28, wherein the one or more further antigen is H5, H7, or H9 of influenza virus.

30. The method according to claim 29, wherein said H5 of influenza virus is H5 protein of a H5N1 virus of a clade different than clade 1.

31. A method for the prophylaxis or treatment of infections caused by H5N1 virus of a clade other than clade 1 comprising administering to a subject a pharmaceutical composition, preferably of a single-shot vaccine or a one dose vaccine comprising an H5 protein comprising a polypeptide sequence having at least 98% sequence identity with the polypeptide sequence of SEQ ID NO:1, wherein said H5N1 virus of a different clade is a H5N1 virus comprising:
a. a polynucleotide encoding a second H5 protein of influenza virus, wherein said second H5 protein encodes an amino acid sequence comprising:
i. the amino acids 113D, 126H, 145(−), 156R, 160F, 167T, and 181N, wherein the modification 145(−) means that amino acid position 145 of H5 is deleted, or
ii. the amino acids 87P, 145L, 172T, 201E, 206I, 208K, 254T, 341G and 421K, or
iii. the amino acids 145L, 172T, and 254V, wherein the numbering of the amino acid positions of the second H5 protein of group (i), (ii), and (iii) refers to the amino acid position as exemplarily given in SEQ ID NO:8; or
iv. an amino acid sequence which is at least 95%, preferably at least 96%, more preferably at least 97%, still more preferably at least 98%, yet more preferably at least 99%, or in particular preferred 100% homolog with any one of the sequences as set forth in SEQ ID NOs: 62 to 137 or 9 to 46; or
b. a second H5 protein of influenza virus, wherein said second H5 protein comprises an amino acid sequence which is at least 95%, preferably at least 96%, more preferably at least 97%, still more preferably at least 98%, yet more preferably at least 99%, or in particular preferred 100% homolog with any one of the sequences as set forth in SEQ ID NOs: 62 to 137.

32. A method for the treatment or prophylaxis of influenza virus infections caused by H5N1 virus of a clade other than clade 1, comprising administration of a therapeutically effective amount of the H5 protein comprising a polypeptide sequence having at least 98% sequence identity with the polypeptide sequence of SEQ ID NO:1 to a subject in need of such a treatment, wherein said H5N1 virus of a clade other than clade 1 is a H5N1 virus comprising:
a. a polynucleotide encoding a second H5 protein of influenza virus, wherein said second H5 protein encodes an amino acid sequence comprising:
i. the amino acids 113D, 126H, 145(−), 156R, 160F, 167T, and 181N, wherein the modification 145(−) means that amino acid position 145 of H5 is deleted, or
ii. the amino acids 87P, 145L, 172T, 201E, 206I, 208K, 254T, 341G and 421K, or
iii. the amino acids 145L, 172T, and 254V,
wherein the numbering of the amino acid positions of the second H5 protein of group (i), (ii), and (iii) refers to the amino acid position as exemplarily given in SEQ ID NO:8, or
iv. an amino acid sequence which is at least 95%, preferably at least 96%, more preferably at least 97%, still more preferably at least 98%, yet more preferably at least 99%, or in particular preferred 100% homolog with any one of the sequences as set forth in SEQ ID NOs: 62 to 137 or 9 to 46; or
b. a second H5 protein of influenza virus, wherein said second H5 protein comprises an amino acid sequence which is at least 95%, preferably at least 96%, more preferably at least 97%, still more preferably at least 98%, yet more preferably at least 99%, or in particular preferred 100% homolog with any one of the sequences as set forth in SEQ ID NOs: 62 to 137.

33. A method for the treatment or prophylaxis of influenza virus infections caused by H5N1 virus of a clade other than clade 1, comprising administration of a therapeutically effective amount of a vaccine comprising an H5 protein comprising a polypeptide sequence having at least 98% sequence identity with the polypeptide sequence of SEQ ID NO:1, and a pharmaceutical acceptable carrier and/or excipient to a subject in need of such a treatment, wherein said H5N1 virus of a clade other than clade 1 is a H5N1 virus comprising:
a. a polynucleotide encoding a second H5 protein of influenza virus, wherein said second H5 protein encodes an amino acid sequence comprising:
i. the amino acids 113D, 126H, 145(−), 156R, 160F, 167T, and 181N, wherein the modification 145(−) means that amino acid position 145 of H5 is deleted, or
ii. the amino acids 87P, 145L, 172T, 201E, 206I, 208K, 254T, 341G and 421K, or
iii. the amino acids 145L, 172T, and 254V,
wherein the numbering of the amino acid positions of the second H5 protein of group (a), (b), and (c) refers to the amino acid position as exemplarily given in SEQ ID NO:8, or
iv. an amino acid sequence which is at least 95%, preferably at least 96%, more preferably at least 97%, still more preferably at least 98%, yet more preferably at least 99%, or in particular preferred 100% homolog with any one of the sequences as set forth in SEQ ID NOs: 62 to 137 or 9 to 46; or
b. a second H5 protein of influenza virus, wherein said second H5 protein comprises an amino acid sequence which is at least 95%, preferably at least 96%, more preferably at least 97%, still more preferably at least 98%, yet more preferably at least 99%, or in particular preferred 100% homolog with any one of the sequences as set forth in SEQ ID NOs: 62 to 137.

34. The method of claim 32, wherein said administration is a single-shot administration or a one dose administration.

35. A kit of parts, that comprises:
a. an H5 protein comprising a polypeptide sequence having at least 98% sequence identity with the polypeptide sequence of SEQ ID NO:1; and
b. a package leaflet indicating the use of such H5 protein according to a) for the treatment or prophylaxis of infections caused by H5N1 virus of a clade other than clade 1, wherein said H5N1 virus of a clade other than clade 1 is a H5N1 virus comprising:
i. a polynucleotide encoding a second H5 protein of influenza virus, wherein said second H5 protein encodes an amino acid sequence comprising:
1. the amino acids 113D, 126H, 145(−), 156R, 160F, 167T, and 181N, wherein the modification 145(−) means that amino acid position 145 of H5 is deleted, or
2. the amino acids 87P, 145L, 172T, 201E, 206I, 208K, 254T, 341G and 421K, or
3. the amino acids 145L, 172T, and 254V,
wherein the numbering of the amino acid positions of the second H5 protein of group (1), (2), and (3) refers to the amino acid position as exemplarily given in SEQ ID NO:8; or
4. an amino acid sequence which is at least 95%, preferably at least 96%, more preferably at least 97%, still more preferably at least 98%, yet more preferably at least 99%, or in particular preferred 100% homolog with any one of the sequences as set forth in SEQ ID NOs: 62 to 137 or 9 to 46; or
ii. a second H5 protein of influenza virus, wherein said second H5 protein comprises an amino acid sequence which is at least 95%, preferably at least 96%, more preferably at least 97%, still more preferably at least 98%, yet more preferably at least 99%, or in particular preferred 100% homolog with any one of the sequences as set forth in SEQ ID NOs: 62 to 137.

36. The kit according to claim 35, wherein such kit comprises at least one or more further antigens of poultry or mammalian pathogen.

37. The method according to claim 19, for use as a single-shot vaccine or in a one-dose vaccination.

38. A method of reducing the incidence of or severity of influenza infection, said influenza infection being with a H5N1 virus of a different clade, said method comprising the step of administering a composition comprising the H5 protein comprising a polypeptide sequence having at least 98% sequence identity with the polypeptide sequence of SEQ ID NO:1, wherein said H5N1 virus of a different clade is a H5N1 virus of a clade other than clade 1 comprising:
a. a polynucleotide encoding a second H5 protein of influenza virus, wherein said second H5 protein encodes an amino acid sequence comprising:
i. the amino acids 113D, 126H, 145(−), 156R, 160F, 167T, and 181N, wherein the modification 145(−) means that amino acid position 145 of H5 is deleted, or
ii. the amino acids 87P, 145L, 172T, 201E, 206I, 208K, 254T, 341G and 421K, or
iii. the amino acids 145L, 172T, and 254V, wherein the numbering of the amino acid positions of the second H5 protein of group (i), (ii), and (iii) refers to the amino acid position as exemplarily given in SEQ ID NO:8; or
iv. an amino acid sequence which is at least 95%, preferably at least 96%, more preferably at least 97%, still more preferably at least 98%, yet more preferably at least 99%, or in particular preferred 100% homolog with any one of the sequences as set forth in SEQ ID NOs: 62 to 137 or 9 to 46, or
b. a second H5 protein of influenza virus, wherein said second H5 protein comprises an amino acid sequence which is at least 95%, preferably at least 96%, more preferably at least 97%, still more preferably at least 98%, yet more preferably at least 99%, or in particular preferred 100% homolog with any one of the sequences as set forth in SEQ ID NOs: 62 to 137.

39. A method for reducing viral shedding in a subject comprising administering to said subject an H5 protein comprising a polypeptide sequence having at least 98% sequence identity with the polypeptide sequence of SEQ ID NO:1, wherein said H5 protein is to be administered to a subject infected with or at risk of a viral infection with H5N1 virus of a clade other than clade 1, and wherein said H5N1 virus of a clade other than clade 1 is a H5N1 virus comprising:
a. a polynucleotide encoding a second H5 protein of influenza virus, wherein said second H5 protein encodes an amino acid sequence comprising:
i. the amino acids 113D, 126H, 145(−), 156R, 160F, 167T, and 181N, wherein the modification 145(−) means that amino acid position 145 of H5 is deleted, or
ii. the amino acids 87P, 145L, 172T, 201E, 206I, 208K, 254T, 341G and 421K, or
iii. the amino acids 145L, 172T, and 254V, wherein the numbering of the amino acid positions of the second H5 protein of group (i), (ii), and (iii) refers to the amino acid position as exemplarily given in SEQ ID NO:8; or
iv. an amino acid sequence which is at least 95%, preferably at least 96%, more preferably at least 97%, still more preferably at least 98%, yet more preferably at least 99%, or in particular preferred 100% homolog with any one of the sequences as set forth in SEQ ID NOs: 62 to 137 or 9 to 46; or
b. a second H5 protein of influenza virus, wherein said second H5 protein comprises an amino acid sequence which is at least 95%, preferably at least 96%, more preferably at least 97%, still more preferably at least 98%, yet more preferably at least 99%, or in particular preferred 100% homolog with any one of the sequences as set forth in SEQ ID NOs: 62 to 137.

40. A method for reducing viral shedding in a subject infected with or at risk of a viral infection with H5N1 virus of a clade other than clade 1 comprising administering to said subject a medicament comprising an H5 protein comprising a polypeptide sequence having at least 98% sequence identity with the polypeptide sequence of SEQ ID NO:1, wherein said H5N1 virus of a clade other than clade 1 is a H5N1 virus comprising:
a. a polynucleotide encoding a second H5 protein of influenza virus, wherein said second H5 protein encodes an amino acid sequence comprising:
i. the amino acids 113D, 126H, 145(−), 156R, 160F, 167T, and 181N, wherein the modification 145(−) means that amino acid position 145 of H5 is deleted, or
ii. the amino acids 87P, 145L, 172T, 201E, 206I, 208K, 254T, 341G and 421K, or
iii. the amino acids 145L, 172T, and 254V,
wherein the numbering of the amino acid positions of the second H5 protein of group (i), (ii), and (iii) refers to the amino acid position as exemplarily given in SEQ ID NO:8; or
iv. an amino acid sequence which is at least 95%, preferably at least 96%, more preferably at least 97%, still more preferably at least 98%, yet more preferably at least 99%, or in particular preferred 100% homolog with any one of the sequences as set forth in SEQ ID NOs: 62 to 137 or 9 to 46; or
b. a second H5 protein of influenza virus, wherein said second H5 protein comprises an amino acid sequence which is at least 95%, preferably at least 96%, more preferably at least 97%, still more preferably at least 98%, yet more preferably at least 99%, or in particular preferred 100% homolog with any one of the sequences as set forth in SEQ ID NOs: 62 to 137.

The application's sequence listing, which the Patent Office published only in electronic form, follows.

SEQUENCE LISTING (140 sequences)

SEQ ID NO: 1 - protein, 552 aa, Avian influenza virus
DQICIGYHANNSTEQVDTIMEKNVTVTHAQDILEKTHNGKLCDLDGVKPLILRDCSVAGWLLGNPMCDEFINVPEWSYIVEKANPANDLCYPGDFNDYEELKHLLSRINHFEKIQIIPKNSWSSHEASLGVSSACPYQGKSSFFRNVVWLIKKNNAYPTIKRSYNNTNQEDLLVLWGIHHPNDAAEQTRLYQNPTTYISVGTSTLNQRLVPKIATRSKVNGQNGRMEFFWTILKPNDAINFESNGNFIAPEYAYKIVKKGDSAIMKSELEYGNCNTKCQTPMGAINSSMPFHNIHPLTIGECPKYVKSNRLVLATGLRNSPQRERRRKKRGLFGAIAGFIEGGWQGMVDGWYGYHHSNEQGSGYAADKESTQKAIDGVTNKVNSIIDKMNTQFEAVGREFNNLERRIENLNKKMEDGFLDVWTYNAELLVLMENERTLDFHDSNVKNLYDKVRLQLRDNAKELGNGCFEFYHKCDNECMESVRNGTYDYPQYSEEARLKREEISGVKLESIGTYQILSIYSTVASSLALAIMVAGLSLWMCSNGSLQCRICI

SEQ ID NO: 2 - protein, 551 aa, Avian influenza virus
DQICIGYHANNSTEQVDTIMEKNVTVTHAQDILEKTHNGKLCDLDGVKPLILRDCSVAGWLLGNPMCDEFINVPEWSYIVEKANPANDLCYPGNFNDYEELKHLLSRINHFEKIQIIPKSSWSDHEASSGVSSACPYQGSSSFFRNVVWLIKKNDAYPTIKRSYNNTNQEDLLVLWGIHHPNDAAEQTRLYQNPTTYISVGTSTLNQRLVPKIATRSKVNGQSGRMDFFWTILKPNDAINFESNGNFIAPEYAYKIVKKGDSAIMKSEVEYGNCNTKCQTPMGAINSSMPFHNIHPLTIGECPKYVKSNKLVLATGLRNSPQRERRRKRGLFGAIAGFIEGGWQGMVDGWYGYHHSNEQGSGYAADKESTQKAIDGVTNKVNSIIDKMNTQFEAVGREFNNLERRIENLNKKMEDGFLDVWTYNAELLVLMENERTLDFHDSNVKNLYDKVRLQLRDNAKELGNGCFEFYHKCDNECMESVRNGTYDYPQYSEEARLKREEISGVKLESIGTYQILSIYSTVASSLALAIMVAGLSLWMCSNGSLQCRICI

SEQ ID NO: 3 - protein, 567 aa, Avian influenza virus
MEKTVLLLAIVSLVKSDQICIGYHANNSTEQVDTIMEKNVTVTHAQDILEKTHNGKLCDLDGVKPLILRDCSVAGWLLGNPMCDEFINVPEWSYIVEKANPANDLCYPGNFNDYEELKHLLSRINHFEKIQIIPKSSWSDHEASSGVSSACPYQGSSSFFRNVVWLIKKNDAYPTIKRSYNNTNQEDLLVLWGIHHPNDAAEQTRLYQNPTTYISVGTSTLNQRLVPKIATRSKVNGQSGRMDFFWTILKPNDAINFESNGNFIAPEYAYKIVKKGDSAIMKSEVEYGNCNTKCQTPMGAINSSMPFHNIHPLTIGECPKYVKSNKLVLATGLRNSPQRERRRKRGLFGAIAGFIEGGWQGMVDGWYGYHHSNEQGSGYAADKESTQKAIDGVTNKVNSIIDKMNTQFEAVGREFNNLERRIENLNKKMEDGFLDVWTYNAELLVLMENERTLDFHDSNVKNLYDKVRLQLRDNAKELGNGCFEFYHKCDNECMESVRNGTYDYPQYSEEARLKREEISGVKLESIGTYQILSIYSTVASSLALAIMVAGLSLWMCSNGSLQCRICI

SEQ ID NO: 4 - protein, 568 aa, Avian influenza virus
MEKIVLLFAIVSLVKSDQICIGYHANNSTEQVDTIMEKNVTVTHAQDILEKTHNGKLCDLDGVKPLILRDCSVAGWLLGNPMCDEFINVPEWSYIVEKANPANDLCYPGDFNDYEELKHLLSRINHFEKIQIIPKNSWSSHEASLGVSSACPYQGKSSFFRNVVWLIKKNNAYPTIKRSYNNTNQEDLLVLWGIHHPNDAAEQTRLYQNPTTYISVGTSTLNQRLVPKIATRSKVNGQNGRMEFFWTILKPNDAINFESNGNFIAPEYAYKIVKKGDSAIMKSELEYGNCNTKCQTPMGAINSSMPFHNIHPLTIGECPKYVKSNRLVLATGLRNSPQRERRRKKRGLFGAIAGFIEGGWQGMVDGWYGYHHSNEQGSGYAADKESTQKAIDGVTNKVNSIIDKMNTQFEAVGREFNNLERRIENLNKKMEDGFLDVWTYNAELLVLMENERTLDFHDSNVKNLYDKVRLQLRDNAKELGNGCFEFYHKCDNECMESVRNGTYDYPQYSEEARLKREEISGVKLESIGTYQILSIYSTVASSLALAIMVAGLSLWMCSNGSLQCRICI

SEQ ID NO: 5 - protein, 568 aa, Avian influenza virus
MEKTVLLLAIVSLVKSDQICIGYHANNSTEQVDTIMEKNVTVTHAQDILEKTHNGKLCDLDGVKPLILRDCSVAGWLLGNPMCDEFINVPEWSYIVEKANPANDLCYPGNFNDYEELKHLLSRINHFEKIQIIPKNSWSDHEASSGVSSACPYQGSSSFFRNVVWLIKKNNAYPTIKRSYNNTNQEDLLVLWGIHHPNDAAEQTRLYQNPTTYISVGTSTLNQRLVPKIATRSKVNGQNGRMDFFWTILKPNDAINFESNGNFIAPEYAYKIVKKGDSAIMKSEVEYGNCNTKCQTPMGAINSSMPFHNIHPLTIGECPKYVKSNKLVLATGLRNSPQRERRRKKRGLFGAIAGFIEGGWQGMVDGWYGYHHSNEQGSGYAADKESTQKAIDGVTNKVNSIIDKMNTQFEAVGREFNNLERRIENLNKKMEDGFLDVWTYNAELLVLMENERTLDFHDSNVKNLYDKVRLQLRDNAKELGNGCFEFYHKCDNECMESVRNGTYDYPQYSEEARLKREEISGVKLESIGTYQILSIYSTVASSLALAIMVAGLSLWMCSNGSLQCRICI

SEQ ID NO: 6 - protein, 263 aa, Avian influenza virus
HANNWTEQVDTIMEKNVTVTHAQDILEKTHNGKLCDLDGVKPLILRDCSVAGWLLGNPMCDEFINVPEWSYIVEKANPANDLCYPGDFNDYEELKHLLSRINHFEKIQIIPKNSWSSHEASLGVSSACPYQGKSSFFRNVVWLIKKNNAYPTIKRSYNNTNQEDLLVLWGIHHPNDAAEQTRLYQNPTTYISVGTSTLNQRLVPKIATRSKVNGQNGRMEFFWTILKPNDAINFESNGNFIAPEYAYKIVKKGDSAIMKSELE

SEQ ID NO: 7 - protein, 290 aa, Avian influenza virus
GSATMEKTVLLLAIVSLVKSDQICIGYHANNSTEQVDTIMEKNVTVTHAQDILEKTHNGKLCDLDGVKPLILRDCSVAGWLLGNPMCDEFINVPEWSYIVEKANPANDLCYPGNFNDYEELKHLLSRINHFEKIQIIPKSSWSDHEASSGVSSACPYQGSSSFFRNVVWLIKKNDAYPTIKRSYNNTNQEDLLVLWGIHHPNDAAEQTRLYQNPTTYISVGTSTLNQRLVPKIATRSKVNGQSGRMDFFWTILKPNDAINFESNGNFIAPEYAYKIVKKGDSAIMKSEVE

SEQ ID NO: 8 - protein, 562 aa, Influenza A virus
  MISC_FEATURE: subtype H5N1
MEKIVLLLAIVSLVKSDQICIGYHANNSTEQVDTIMEKNVTVTHAQDILEKTHNGKLCDLDGVKPLILRDCSVAGWLLGNPMCDEFLNVSEWSYIVEKINPANDLCYPGNFNNYEELKHLLSRINRFEKIQIIPKSSWPDHEASSGVSSACPYQGGPSFYRNVVWLIKKDNAYPTIKKSYHNTNQEDLLVLWGIHHPNDEAEQTRLYQNPTTYISVGTSTLNQRLVPKIATRSKVNGQSGRVEFFWTILKSNDAINFESNGNFIAPENAYKIVKKGDSTIMKSELEYGNCNTKCQTPIGAINSSMPFHNIHPLTIGECPKYVKSNRLVLATGLRNSPQGERRRKKRGLFGAIAGFIEGGWQGMVDGWYGYHHSNEQGSGYAADKESTQKAIDGVTNKVNSIIDKMNTQFEAVGREFNNLERRIENLNKKMEDGFLDVWTYNAELLVLMENERTLDFHDSNVKNLYDKVRLQLRDNAKELGNGCFEFYHRCDNECMESVRNGTYDYPQYSEEARLKREEISGVKLESIGTYQILSIYSTVASSLALAIMVAGLFLWMCSNGSL

SEQ ID NO: 9 - protein, 567 aa, Influenza A virus
  MISC_FEATURE: subtype H5N1
MEKIMLLLAIVSLVKSDQICIGYHANNSTEQVDTIMEKNVTVTHAQDILEKTHNGKLCNLDGVKPLILRDCSVAGWLLGNPMCDEFLNVPEWSYIVEKINPANDLCYPGKFNDYEELKHLLSRINHFEKIQIIPRNSWSDHETSGVSSACQYQGRSSFFRNVVWLTKKDNAYSTIKRSYNNTNQEDLLVLWGIHHPNDAAEQTRLYQNPTTYISVGTSTLNQRLVPKIATRSKVNGQSGRMEFFWTILKSNDAINFESNGNFIAPENAYKIVKKGDSTIMKSELEYGNCNTKCQTPIGAINSSMPFHNIHPLTIGECPKYVKSNRLVLATGLRNSPQEERRRKKRGLFGAIAGFIEGGWQGMVDGWYGYHHSNEQGSGYAADKESTQKAIDGVTNKVNSIIDKMNTQFEAVGREFNNLERRIENLNKKMEDGFLDVWTYNAELLVLMENERTLDFHDSNVKNLYDKVRLQLRDNAKELGNGCFEFYHRCDNECMESVRNGTYDYPQYSEEARLKREEISGVKLESIGTYQILSIYSTVASSLALAIMVAGLFLWMCSNGSLQCRICI

SEQ ID NO: 10 - protein, 567 aa, Influenza A virus
  MISC_FEATURE: subtype H5N1
MEKIVLLLAIVSIVKSDQICIGYHANNSTEQVDTIMEKNVTVTHAQDILEKTHNGKLCNLDGVKPLILRDCSVAGWLLGNPMCDEFLNVPEWSYIVEKINPANDLCYPGNFNDYEELKHLLSRINHFEKIQIIPKGSWSDHEASGVSSACPYQGRSSFFRNVVWLTKKNNAYPTIKKSYNNTNQEDLLVLWGIHHPNDAAEQTRLYQNPTTYISVGTSTLNQRLVPKIATRSKVNGQSGRMEFFWTILKSNDAINFESNGNFIAPENAYKIVKKGDSTIMKSELEYGNCNTKCQTPIGAINSSMPFHNIHPLTIGECPKYVKSNRLVLATGLRNSPQGERRRKKRGLFGAIAGFIEGGWQGMVDGWYGYHHSNEQGSGYAADKESTQKAIDGVTNKVNSIIDKMNTQFEAVGREFNNLERRIENLNKKMEDGFLDVWTYNAELLVLMENERTLDFHDSNVKNLYDRVRLQLRDNAKELGNGCFEFYHRCDNECMESVRNGTYDYPQYSEEARLKREEISGVKLESIGTYQILSIYSTVASSLALAIMVAGLFLWMCSNGSLQCRICI

SEQ ID NO: 11 - protein, 560 aa, Influenza A virus
  MISC_FEATURE: subtype H5N1
  misc_feature (560)..(560): Xaa can be any naturally occurring amino acid
MEKIVLLLAIVSLVKGDQICIGYHANNSTEQVDTIMEKNVTVTHAQDILEKTHNGKLCNLDGVKPLILRDCSVAGWLLGNPMCDEFLNVPEWSYIVEKIYPANDLCYPGNFNDYEELKHLLSRINHFEKIQIIPKSSWSDHEASGVSSACPYQGRSSFFRNVVWLTKKDNAYPTIKKSYNNTNQEDLLILWGIHHPNDAAEQTRLYQNPTTYISVGTSTLNQRLVPKIATRSKVNGQSGRMEFFWTILKSNDAINFESNGNFIAPENAYKIVKKGDSTIMKSELEYGNCNTKCQTPIGAINSSMPFHNIHPLTIGECPKYVKSNRLVLATGLRNSPQGERRRKKRGLFGAIAGFIEGGWQGMVDGWYGYHHSNEQGSGYAADKESTQKAIDGVTNKVNSIIDKMNTQFEAVGREFNNLERRIENLNKKMEDGFLDVWTYNAELLVLMENERTLDFHDSNVKNLYDKVRLQLRDNAKELGNGCFEFYHRCDNECMESVRNGTYDYPQYSEEARLKREEISGVKLESIGTYQILSIYSTVASSLALAIMVAGLFLWMCSNGX

SEQ ID NO: 12 - protein, 544 aa, Influenza A virus
  MISC_FEATURE: subtype H5N1
  misc_feature (1)..(1): Xaa can be any naturally occurring amino acid
  misc_feature (544)..(544): Xaa can be any naturally occurring amino acid
XLLAIVSIVKSDQICIGYHANNSTEQVDTIMEKNVTVTHAQDILEKTHNGKLCNLDGVKPLILRDCSVAGWLLGNPMCDEFLDVPEWSYIVEKINPANDLCYPGNFNDYEELKHLLSRINHFEKIQIIPKNSWSDHETSGVSSACPYQGRSSFFRNVVWLTKKNTAYPTIKKSYNNTNQEDLLVLWGIHHPNDAAEQTRLYQNPTTYISVGTSTLNQRLVPKIATRSKVNGQSGRMEFFWTILKSNDAINFESNGNFIAPENAYKIVKKGDSTIMKSELEYGNCNTKCQTPIGAINSSMPFHNIHPLTIGECPKYVKSNRLVLATGLRNSPHGERRRKKRGLFGAIAGFIEGGWQGMVDGWYGYHHSNEQGSGYAADKESTQKAIDGVTNKVNSIIDKMNTQFEAVGREFNNLERRIENLNKKMEDGFLDVWTYNAELLVLMENERTLDFHDSNVKNLYDKVRLQLRDNAKELGNGCFEFYHRCDNECMESVRNGTYDYPQYSEEARLKREEISGVKLESIGTYQILSIYSTVASSLALAIMVX

SEQ ID NO: 13 - protein, 534 aa, Influenza A virus
  MISC_FEATURE: subtype H5N1
  misc_feature (1)..(1): Xaa can be any naturally occurring amino acid
XVKSDQICIGYHANNSTEQVDTIMEKNVTVTHAQDILEKTHNGKLCNLDGVKPLILRDCSVAGWLLGNPMCDEFLNVEWSYIVEKINPTNDLCYPGNFNDYEELKHLLSRINHFEKIQIIPKNYWSDHETSGVSSACPYQGRPSFFRNVVWLTKKNNAYPTIKKSYNNTNQEDLLVLWGIHHPNDAAEQTRLYQNPTTYISVGTSTLNQRLVPKIATRSKVNGQSGRMEFFWTILKSNDAINFESNGNFIAPENAYKIVKKGDSTIMKSELEYGNCNTKCQTPIGAINSSMPFHNIHPLTIGECPKYVKSNRLVLATGLRNSPQGERRRKKRGLFGAIAGFIEGGWQGMVDGWYGYHHSNEQGSGYAADKESTQKAIDGVTNKVNSIIDKMNTQFEAVGREFNNLERRIENLNKKMEDGFLDVWTYNAELLVLMENERTLDFHDSNVKNLYDKVRLQLRDNAKELGNGCFEFYHRCDNECMESVRNGTYDYPQYSEEARLKREEISGVKLESIGTYQILSIYSTVASSLALAIM

SEQ ID NO: 14 - protein, 548 aa, Influenza A virus
  MISC_FEATURE: subtype H5N1
  misc_feature (1)..(1): Xaa can be any naturally occurring amino acid
  misc_feature (548)..(548): Xaa can be any naturally occurring amino acid
XVKSDQICIGYHANNSTEQVDTIMEKNVTVTHAQDILEKTHNGKLCNLDGVKPLILRDCSVAGWLLGNPMCDKFLNVPEWSYIVEKINPTNDLCYPGNFNDYEELKHLLSRINHFEKIQIIPKNSWSDHEASGVSSACPYQGRSSFFRNVVWLTKKNNAYPTIKKSYNNTNQEDLLVLWGIHHPNDAAEQTRLYQNPTTYISVGTSTLNQRLVPKIATRSKVNGQSGRMEFFWTILKSNDAINFESNGNFIAPENAYKIVKKGDSTIMKSELEYGDCNTKCQTPIGAINSSMPFHNIHPLTIGECPKYVKSNRLVLATGLRNSPQGERRRKKRGLFGAIAGFIEGGWQGMVDGWYGYHHSNEQGSGYAADKESTQKAIDGVTNKVNSIIDKMNTQFEAVGREFNNLERRIENLNKKMEDGFLDVWTYNAELLVLMENERTLDFHDSNVKNLYDKVRLQLRDNAKELGNGCFEFYHRCDNECMESVRNGTYDYPQYSEEARLKREEISGVKLESIGTYQILSIYSTVASSLALAIMVAGLFLWMCSNGX

SEQ ID NO: 15 - protein, 541 aa, Influenza A virus
  MISC_FEATURE: subtype H5N1
  misc_feature (1)..(1): Xaa can be any naturally occurring amino acid
  misc_feature (541)..(541): Xaa can be any naturally occurring amino acid
XIVSIVKSDQICIGYHANNSTEQVDTIMEKNVTVTHAQDILEKTHNGKLCNLDGVKPLILRDCSVAGWLLGNPMCDEFLNVPEWSYIVEKINPTNDLCYPGNFNDYEELKHLLSRINHFEKIQIIPKNSWSDHEASGVSSACPYQGRSSFFRNVVWLTKKNNAYPTIKKSYNNTNQEDLLVLWGIHHPNDAAEQTRLYQNPTTYISVGTSTLNQRLVPKIATRSKVNGQSGRMEFFWTILKSNDAINFESNGNFIAPENAYKIVKKGDSTIMKSELEYGDCNTKCQTPIGAINSSMPFHNIHPLTIGECPKYVKSNRLVLATGLRNSPQGERRRKKRGLFGAIAGFIEGGWQGMVDGWYGYHHSNEQGSGYAADKESTQKAIDGVTNKVNSIIDKMNTQFEAVGREFNNLERRIENLNKKMEDGFLDVWTYNAELLVLMENERTLDFHDSNVKNLYDKVRLQLRDNAKELGNGCFEFYHRCDNECMESVRNGTYDYPQYSEEARLKREEISGVKLESIGTYQILSIYSTVASSLALAIMVX

SEQ ID NO: 16 - protein, 520 aa, Influenza A virus
  MISC_FEATURE: subtype H5N1
  misc_feature (1)..(1): Xaa can be any naturally occurring amino acid
  misc_feature (159)..(159): Xaa can be any naturally occurring amino acid
XVKSDQICIGYHANNSTEQVDTIMEKNVTVTHAQDILEKTHNGKLCNLDGVKPLILRDCSVAGWLLGNPMCDEFLNVPEWSYIVEKINPANDLCYPGNFNDYEELKHLLSRINHFEKIQIIPKNSWSDHEASGVSSACPYQGRSSFFRNVVWLTKKNNXYPTIKKSYNNTNQEDLLVLWGIHHPNDAAEQTKLYQNPTTYISVGTSTLNQRLVPKIATRSKVNGQSGRMEFFWTILKSNDAINFESNGNFIAPENAYKIVKKGDSTIMKSELEYGNCNTKCQTPIGAINSSMPFHNIHPLTIGECPKYVKSNRLVLATGLRNSPQGERRRKKRGLFGAIAGFIEGGWQGMVDGWYGYHHSNEQGSGYAADKESTQKAIDGVTNKVNSIIDKMNTQFEAVGREFNNLERRIENLNKKMEDGFLDVWTYNAELLVLMENERTLDFHDSNVKNLYDKVRLQLRDNAKELGNGCFEFYHRCDNECMESVRNGTYDYPQYSEEARLKREEISGVKLESIGTYQIL

SEQ ID NO: 17 - protein, 537 aa, Influenza A virus
  MISC_FEATURE: subtype H5N1
  misc_feature (1)..(1): Xaa can be any naturally occurring amino acid
  misc_feature (537)..(537): Xaa can be any naturally occurring amino acid
XSIVKSDQICIGYHANNSTEQVDTIMEKNVTVTHAQDILEKTHNGKLCNLDGVKPLILRDCSVAGWLLGNPMCDEFLNVPEWSYIVEKINPANDLCYPGNFNDYEELKHLLSRINHFEKIQIIPKNSWSDHEASGVSSACPYQGRSSFFRNVVWLTKKNNAYPTIKKSYNNTNQEDLLVLWGIHHPNDEAEQTRLYQNPTTYISVGTSTLNQRLVPKIATRSKVNGQSGRMEFFWTILKSNDAINFESNGNFIAPENAYKIVKKGDSTIMKSELEYGNCNTKCQTPIGAINSSMPFHNIHPLTIGECPKYVKSNRLVLATGLRNSPQGERRRKKRGLFGAIAGFIEGGWQGMVDGWYGYHHSNEQGSGYAADKESTQKAIDGVTNKVNSIIDKMNTQFEAVGREFNNLERRIENLNKKMEDGFLDVWTYNAELLVLMENERTLDFHDSNVKNLYDKVRLQLRDNAKELGNGCFEFYHRCDNECMESVRNGTYDYPQYSEEARLKREEISGVKLESIGTYQILSIYSTVASSLALAIX

SEQ ID NO: 18 - protein, 528 aa, Influenza A virus
  MISC_FEATURE: subtype H5N1
  misc_feature (1)..(1): Xaa can be any naturally occurring amino acid
  misc_feature (528)..(528): Xaa can be any naturally occurring amino acid
XIVSIVKSDQICIGYHANNSTEQVDTIMEKNVTVTHAQDILEKTHNGKLCNLDGVKPLILRDCSVAGWLLGNPMCDEFLNVPEWSYIVEKINPANDLCYPGNFNDYEELKHLLSRINHFEKIQIIPKNSWSDHEASGVSSACPYQGRSSFFRNVVWLTKKNNAYPTIKKSYNNTNQEDLLVLWGIHHPNDAAEQTRLYQNPTTYISVGTSTLNQRLVPKIANRSKVNGQSGRMEFFWTILKSNDAINFESNGNFIAPENAYKIVKKGDSTIMKSELEYGNCNTKCQTPIGAINSSMPFHNIHPLTIGECPKYVKSNRLVLATGLRNSPQGERRRKKRGLFGAIAGFIEGGWQGMVDGWYGYHHSNEQGSGYAADKESTQKAIDGVTNKVNSIIDKMNTQFEAVGREFNNLERRIENLNKKMEDGFLDVWTYNAELLVLMENERTLDFHDSNVKNLYDKVRLQLRDNAKELGNGCFEFYHRCDNECMESVRNGTYDYPQYSEEARLKREEISGVKLESIGTYQILSIYX

SEQ ID NO: 19 - protein, 535 aa, Influenza A virus
  MISC_FEATURE: subtype H5N1
  misc_feature (1)..(1): Xaa can be any naturally occurring amino acid
  misc_feature (535)..(535): Xaa can be any naturally occurring amino acid
XVKSDQICIGYHANNSTEQVDTIMEKNVTVTHAQDILEKTHNGKLCNLDGVKPLILRDCSVAGWLLGNPMCDEFLNVPEWSYIVEKINPANDLCYPGNFNDYEELKHLLSRINHFEKIQIIPKNSWSDHEASGVSSACPYQGRSSFFRNVVWLTKKDNAYPTIKRSYNNTNQEDLLVLWGIHHPNDAAEQTRLYQNPTTYISVGTSTLNQRLVPKIATRSKVNGQSGRMEFFWTILKSNDAINFESNGNFIAPENAYKIVKKGDSTIMKSELEYGNCNTKCQTPIGAINSSMPFHNIHPLTIGECPKYVKSNRLVLATGLRNSPQGERRRKKRGLFGAIAGFIEGGWQGMVDGWYGYHHSNEQGSGYAADKESTQKAIDGVTNKVNSIIDKMNTQFEAVGREFNNLERRIENLNKKMEDGFLDVWTYNAELLVLMENERTLDFHDSNVKNLYDKVRLQLRDNAKELGNGCFEFYHRCDNECMESVRNGTYDYPQYSEEARLKREEISGVKLESIGTYQILSIYSTVASSLALAIX

SEQ ID NO: 20 - protein, 568 aa, Influenza A virus
  MISC_FEATURE: subtype H5N1
MEKIVLLLAIVSLVKSDQICIGYHANNSTEQVDTIMEKNVTVTHAQDILEKTHNGKLCDLGGVKPLILRDCSVAGWLLGNPMCDEFPNVSEWSYIVEKINPANDLCYPGNFNNYEELKHLLSRINRFEKIQIIPKSSWPDHEASLGVSSACPYQGGPSFYRNVVWLIKKNDTYPTIKESYHNTNQEDLLVLWGIHHPNNEEEQKRIYKNPTTYVSVGTSTLNQRLVPKIATRSKVNGQSGRVEFFWTILKSNDTINFESNGNFIAPENAYKIVKKGDSTIMKSELEYGNCSTKCQTPIGAINTSMPFHNIHPLTIGECPKYVKSNRLVLATGLRNSPQGEGRRKKRGLFGAIAGFIEGGWQGMVDGWYGYHHSNEQGSGYAADKESTQKAIDGVTNKVNSIIDKMNTQFEAVGREFNNLEKRIENLNKKMEDGFLDVWTYNAELLVLMENERTLDFHDSNVRNLYDKVRLQLRDNAKELGNGCFEFYHRCDNECMESVRNGTYDYPQYSEEARLKREEISGVKLESIGTYQILSIYSTVASSLALAIMVAGLFLWMCSNGSLQCRICI

SEQ ID NO: 21 - protein, 568 aa, Influenza A virus
  MISC_FEATURE: subtype H5N1
  misc_feature (375)..(375): Xaa can be any naturally occurring amino acid
MEKIVLLLAIVSLVKSDQICIGYHANNSTEQVDTIMEKNVTVTHAQDILEKTHNGKLCDLDGVKPLILRDCSVAGWLLGNPMCDEFPNVSEWSYIVEKTNPANDLCYPGNFNNYEELKHLLSRINRFEKIKIIPKSSWPDHEASLGVSSACPYQGEPSFYRNVVWLIKKNNTYPTIKESYHNTNQEDLLVLWGIHHPNDEEEQTRIYKNPTTYISVGTSTLNQRLVPKIATRSKVNGQSGRVEFFWTILKSNDTINFESNGNFIAPENAYKIVKKGDSTIMKSELEYGNCSTKCQTPVGAINSSMPFHNIHPLTIGECPKYVKSNRLVLATGLRNSPQGEGRRKKRGLFGAIAGFIEGGWQGMVDGWYGYHHSNXQGSGYAADRESTQKAIDGVTNKVNSIIDKMNTQFEAVGREFNNLEKRIENLNKKMEDGFLDVWTYNAELLVLMENERTLDFHDSNVKNLYDKVRLQLRDNAKELGNGCFEFYHRCDNECIESVRNGTYDYPQYSEEARLKREEISGVKLESIGTYQILSIYSTVASSLALAIIVAGLFLWMCSNGSLQCRICI

SEQ ID NO: 22 - protein, 568 aa, Influenza A virus
  MISC_FEATURE: subtype H5N1
MEKIVLLLAIVSLVKSDQICIGYHANNSTEQVDTIMEKNVTVTHAQDILEKTHNGKLCDLDGVKPLILRDCSVAGWLLGNPMCDEFPNVSEWSYIVEKINPANDLCYPGNFNNYEELKHLLSRINRFEKIKIIPKSSWPDHEASLGVSSACPYQRGPSFYRNVVWLIKKNNTYPTIKKSYHNTNQEDLLVLWGIHHPNDEEEQTRIYKNPTTYISVGTSTLNQRLVPKIATRSKVNGQSGRVEFFWTILKSNDTINFESNGNFIAPENAYKIVKKGDSTIMKSELEYGNCNTKCQTPIGAINSSMPFHNIHPLTIGECPKYVKSNRLVLATGLRNSPQGEGRRKKRGLFGAIAGFIEGGWQGMVDGWYGYHHSNEQGSGYAADKESTQKAIDGVTNKVNSIIDKMNTQFEAVGREFNNLEKRIENLNKKMEDGFLDVWTYNAELLVLMENERTLDFHDSNVKNLYDKVRLQLRDNAKELGNGCFEFYHRCDNECMESVRNGTYDYPQYSEEARLKREEISGVKLESIGTYQILSIYSTVASSLALAIMMAGLFLWMCSNGSLQCRICI

SEQ ID NO: 23 - protein, 568 aa, Influenza A virus
  MISC_FEATURE: subtype H5N1
MEKIVLLLAIVSLVKSDQICIGYHANNSTEQVDTIMEKNVTVTHAQDILEKTHNGKLCDLDGVKPLILRDCSVAGWLLGNPMCDEFPNVSEWSYIVEKINPANDLCYPGNFNNYEELKHLLSRINRFEKIKIIPKSSWPDHEASLGVSSACPYQGGPSFYRNVVWLIKKNNTYPTIKESYHNTNQEDLLVLWGIHHPNDEEEQTRIYKNPTTYISIGTSTLNQRLVPKIATRSKVNGQRGRVEFFWTILKSNDTINFESNGNFIAPENAYKIVKKGDSTIMKSELEYGNCNTKCQTPIGAINSSMPFHNIHPLTIGECPKYVKSNRLVLATGLRNSPQGEGRRKKRGLFGAIAGFIEGGWQGMVDGWYGYHHSNEQGSGYAADKESTQKAIDGVTNKVNSIIDKMNTQFEAVGREFNNLEKRIENLNKKMEDGFLDVWTYNAELLVLMENERTLDFHDSNVKNLYDKVRLQLRDNAKELGNGCFEFYHRCDNECMESVRNGTYDYPQYSEEARLKREEISGVKLESIGTYQILSIYSTVASSLALAIMMAGLFLWMCSNGSLQCRICI

SEQ ID NO: 24 - protein, 568 aa, Influenza A virus
  MISC_FEATURE: subtype H5N1
MEKIVLLLAIVSLVKSDQICIGYHANNSTEQVDTIMEKNVTVTHAQDILEKTHNGKLCDLDGVKPLILRDCSVAGWLLGNPMCDEFPNVSEWSYIVEKINPANDLCYPGNFNNYEELKHLLSRINRFEKIQIIPKSSWPDHEASLGVSSACPYQGEPSFYRNVVWLIKKNNTYPTIKESYHNTNQEDLLVLWGIHHPNDEEEQKRIYKNPTTYISVGTSTLNQRLVPKIATRPKVNGQSGRVEFFWTILKSNDTINFESNGNFIAPKNAYKIVKKGSSTIMKSELEYGNCSTKCQTPIGAINSSMPFHNIHPLTIGECPKYVKSNRLVLATGLRNSPQGEGRRKKRGLFGAIAGFIEGGWQGMVDGWYGYHHSNEQGTGYAADKESTQKAIDGVTNKVNSIIDKMNTQFEAVGREFNNLEKRIENLNKKMEDGFLDVWTYNAELLVLMENERTLDFHDSNVRNLYDKVRLQLRDNAKELGNGCFEFYHKCDNECMESVRNGTYDYPQYSKEARLKREEISGVKLESIGTYQILSIYSTVTSSLALAIMVAGLSLWMCSNGSLQCRICI

SEQ ID NO: 25 - protein, 556 aa, Influenza A virus
  MISC_FEATURE: subtype H5N1
  misc_feature (556)..(556): Xaa can be any naturally occurring amino acid
MEKIVLLLAIVSLVKSDQICIGYHANNSTEQVDTIMEKNVTVTHAQDILEKTHNGKLCDLDGVKPLILRDCSVAGWLLGNPMCDEFPNVSEWSYIVEKTNPANDLCYPGNFNNYEELKHLLSRINRFEKIKIIPKSSWPDHEASLGVSSACPYQGRPSFYRNVVWLIKKNNTYPTIKESYHNTNQEDLLVLWGIHHPNDEEEQTRIYKNPTTYISIGTSTLNQRLIPKIATRSKVNGQSGRVEFFWTILKSNDTINFESNGNFIAPENAYKIVKKGDSTIMKSELEYGNCNTKCQTPIGAINSSMPFHNIHPLTIGECPKYVKSNRLVLATGLRNSPQGEGRRKKRGLFGAIAGFIEGGWQGMVDGWYGYHHSNEQGSGYAADKESTQKAIDGVTNKVNSIIDKMNTQFEAVGREFNNLEKRIENLNKKMEDGFLDVWTYNAELLVLMENERTLDFHDSNVKNLYDKVRLQLRDNAKELGNGCFEFYHRCDNECMESVRNGTYDYPQYSEEARLKREEISGVKLESIGTYQILSIYSTVASSLALAIMMAGLFLWX

SEQ ID NO: 26 - protein, 554 aa, Influenza A virus
  MISC_FEATURE: subtype H5N1
  misc_feature (1)..(1): Xaa can be any naturally occurring amino acid
  misc_feature (554)..(554): Xaa can be any naturally occurring amino acid
XLLAIVSLVKSDQICIGYHANNSTEQVDTIMEKNVTVTHAQDILEKTHNGKLCDLDGVKPLILRDCSVAGWLLGNPMCDEFPNVSEWSYIVEKINPANDLCYPGNFNNYEELKHLLSRINRFEKIQIIPKSSWPDHEASLGVSSACPYQGEPSFYRNVVWLIKKNNTYPTIKENYHNTNQEDLLVLWGIHHPNDEEEQKRIYKNPTTYISVGTSTLNQRLVPKIATRPKVNGQSGRVEFFWTILKSNDTINFESNGNFIAPKNAYKIVKKGSSTIMKSELEYGNCSTKCQTPIGAINSSMPFHNIHPLTIGECPKYVKSNRLVLATGLRNSPQGEGRRKKRGLFGAIAGFIEGGWQGMVDGWYGYHHSNEQGTGYAADKESTQKAIDGVTNKVNSIIDKMNTQFEAVGREFNNLEKRIENLNKKMEDGFLDVWTYNAELLVLMENERTLDFHDSNVRNLYDKVRLQLRDNAKELGNGCFEFYHKCDNECMESVRNGTYDYPQYSKEARLKREEISGVKLESIGTYQILSIYSTVASSLALAIMVAGLSLWMCSX

SEQ ID NO: 27 - protein, 564 aa, Influenza A virus
  MISC_FEATURE: subtype H5N1
VLLLAIVSLVKSDQICIGYHANNSTEQVDTIMEKNVTVTHAQDILEKTHNGKLCDLDGVKPLILRDCSVAGWLLGNPMCDEFPNVSEWSYIVEKINPANDLCYPGNFNNYEELKHLLSRINRFEKIQIIPKSSWPDHEASLGVSSACPYQGEPSFYRNVVWLIKKNNTYPTIKENYHNTNQEDLLVLWGIHHPNDEEEQKRIYKNPTTYISVGTSTLNQRLVPKIATRPKVNGQSGRVEFFWTILKSNDTINFESNGNFIAPKNAYKIVKKGSSTIMKSELEYGNCSTKCQTPIGAINSSMPFHNIHPLTIGECPKYVKSNRLVLATGLRNSPQGEGRRKKRGLFGAIAGFIEGGWQGMVDGWYGYHHSNEQGTGYAADKESTQKAIDGVTNKVNSIIDKMNTQFEAVGREFNNLEKRIENLNKKMEDGFLDVWTYNAELLVLMENERTLDFHDSNVRNLYDKVRLQLRDNAKELGNGCFEFYHKCDNECMESVRNGTYDYPQYSKEARLKREEISGVKLESIGTYQILSIYSTVASSLALAIMVAGLSLWMCSNGSLQCRICI

SEQ ID NO: 28 - protein, 553 aa, Influenza A virus
  MISC_FEATURE: subtype H5N1
  misc_feature (1)..(1): Xaa can be any naturally occurring amino acid
XVLLLAIISLVKSDQICIGYHANNSTEQVDTIMEKNVTVTHAQDILEKTHNGKLCDLDGVKPLILRGCSVAGWLLGNPMCDEFPNVSEWSYIVEKINPANDLCYPGNFNNYEELKHLLSRINRFEKIQIIPKSSWPDHEASLGVSSACPYQGEPSFYRNVVWLIKKNNTYPTIKESYHNTNQEDLLVLWGIHHPNDEEEQKRIYKNPTTYISVGTSTLNQRLVPKIATRPKVNGQSGRVEFFWTILKSNDTINFESNGNFIAPKNAYKIVKKGSSTIMKSELEYGNCSTKCQTPIGAINSSMPFHNIHPLTIGECPKYVKSNRLVLATGLRNSPQGEGRRKKRGLFGAIAGFIEGGWQGMVDGWYGYHHSNEQGTGYAADKESTQKAIDGVTNKVNSIIDKMNTQFEAVGREFNNLEKRIENLNKKMEDGFLDVWTYNAELLVLMENERTLDFHDSNVRNLYDKVRLQLRDNAKELGNGCFEFYHKCDNECMESVRNGTYDYPQYSKEARLKREEISGVKLESIGTYQILSIYSTVASSLALAIMVAGLSLWM

SEQ ID NO: 29 - protein, 558 aa, Influenza A virus
  MISC_FEATURE: subtype H5N1
  misc_feature (558)..(558): Xaa can be any naturally occurring amino acid
IVLLLAIVSLVKSDQICIGYHANNSTEQVDTIMEKNVTVTHAQDILEKTHNGKLCDLDGVKPLILRDCSVAGWLLGNPMCDEFPNVSEWSYIVEKINPANDLCYPGNFNNYEELKHLLSRINRFEKIKIIPKSSWPDHEASLGVSSACPYQGGPSFYRNVVWLIKKNNTYPTIKKSYHNTNQEDLLVLWGIHHPNDEEEQTRIYKNPTTYISVGTSTLNQRLVPKIATRSKVNGQSGRVEFFWTILKSNDTINFESNGNFIAPENAYKIVKKGDSTIMKSELEHGNCNTKCQTPIGAINSSMPFHNIHPLTIGECPKYVKSNRLVLATGLRNSPQGEGRRKKRGLFGAIAGFIEGGWQGMVDGWYGYHHSNEQGSGYAADKESTQKAIDGVTNKVNSIIDKMNTQFEAVGREFNNLEKRIENLNKKMEDGFLDVWTYNAELLVLMENERTLDFHDSNVKNLYDKVRLQLRDNAKELGNGCFEFYHRCDNECMESVRNGTYDYPQYSEEARLNREEISGVKLESIGTYQILSIYSTVASSLALAIMMAGLFLWMCSNGX

SEQ ID NO: 30 - protein, 557 aa, Influenza A virus
  MISC_FEATURE: subtype H5N1
  misc_feature (130)..(130): Xaa can be any naturally occurring amino acid
LLAIVSLVKSDQICIGYHANNSTEQVDTIMEKNVTVTHAQDILEKTHNGKLCDLDGVKPLILRDCSVAGWLLGNPMCDEFPNVSEWSYIVEKINPANDLCYPGNFNNYEELKHLLSRINRFEKIKIIPKXSWPDHEASLGVSSACPYQGGPSFYRNVVWLIKKNNTYPTIKESYHNTNQEDLLVLWGIHHPNDEEEQTRIYKNPTTYISIGTSTLNQRLVPKIATRSKVNGQSGRVEFFWTILKSNDTINFESNGNFIAPENAYKIVKKGDSTIMKSELEYGNCNTKCQTPIGAINSSMPFHNIHPLTIGECPKYVKSNRLVLATGLRNSPQGEGRRKKRGLFGAIAGFIEGGWQGMVDGWYGYHHSNEQGSGYAADKESTQKAIDGVTNKVNSIIDKMNTQFEAVGREFNNLEKRIENLNKKMEDGFLDVWTYNAELLVLMENERTLDFHDSNVKNLYDKVRLQLRDNAKELGNGCFEFYHRCDNECMESVRNGTYDYPQYSEEARLKREEISGVKLESIGTYQILSIYSTVAGSLALAIMMAGLFLWMCSNGSLQ

SEQ ID NO: 31 - protein, 547 aa, Influenza A virus
  MISC_FEATURE: subtype H5N1
  misc_feature (547)..(547): Xaa can be any naturally occurring amino acid
IVLLLAIVSLVKSDQICIGYHANNSTEQVDTIMEKNVTVTHAQDILEKTHNGKLCDLDGVKPLILRDCSVAGWLLGNPMCDEFPNVSEWSYIVEKINPANDLCYPGNFNNYEELKHLLSRINRFEKIKIIPKSSWPDHEASLGVSSACPYQEGPSFYRNVVWLIKKNNTYPTIKKSYHNTNQEDLLVLWGIHHPNDEEEQTRIYKNPTTYISVGTSTLNQRLVPKIATRSKVNGQSGRVEFFWTILKSNDTINFESNGNFIAPENAYKIVKKGDSTIMKSELEYGNCNTKCQTPIGAINSSMPFHNIHPLTIGECPKYVKSNRLVLATGLRNSPQGEGRRKKRGLFGAIAGFIEGGWQGMVDGWYGYHHSNEQGSGYAADKESTQKAIDGVTNKVNSIIDKMNTQFEAVGREFNNLEKRIENLNKKMEDGFLDVWTYNAELLVLMENERTLDFHDSNVKNLYDKVRLQLRDNAKELGNGCFEFYHRCDNECMESVRNGTYDYPQYSEEARLKREEISGVKLESIGTYQILSIYSTVASSLALAIMVX

SEQ ID NO: 32 - protein, 547 aa, Influenza A virus
  MISC_FEATURE: subtype H5N1
  misc_feature (154)..(154): Xaa can be any naturally occurring amino acid
  misc_feature (329)..(329): Xaa can be any naturally occurring amino acid
  misc_feature (547)..(547): Xaa can be any naturally occurring amino acid
IVLLLAIVSLVKSDQICIGYHANNSTEQVDTIMEKNVTVTHAQDILEKTHNGKLCDLDGVKPLILRDCSVAGWLLGNPMCDEFPNVSEWSYIVEKINPANDLCYPGNFNNYEELKHLLSRINRFEKIKIIPKSSWPDHEASLGVSSACPYQGGXSFYRNVVWLIKKNNTYPTIKESYHNTNQEDLLVLWGIHHPNDEEEQTRIYKNPTTYISIGTSTLNQRLVPKIATRSKVNGQSGRVEFFWTILKSNDTINFESNGNFIAPENAYKIVKKGDSTIMKSELEYGNCNTKCQTPIGAINSSMPFHNIHPLTIGECPKYVKSNRLVLATXLRNSPQGEGRRKKRGLFGAIAGFIEGGWQGMVDGWYGYHHSNEQGSGYAADKESTQKAIDGVTNKVNSIIDKMNTQFEAVGREFNNLEKRIENLNKKMEDGFLDVWTYNAELLVLMENERTLDFHDSNVKNLYDKVRLQLRDNAKELGNGCFEFYHRCDNECMESVRNGTYDYPQYSEEARLKREEISGVKLESIGTYQILSIYSTVAGSLALAIMVX

SEQ ID NO: 33 - protein, 559 aa, Influenza A virus
  MISC_FEATURE: subtype H5N1
  misc_feature (1)..(1): Xaa can be any naturally occurring amino acid
XLLLAIVSLVKSDQICIGYHANNSTEQVDTIMEKNVTVTHAQDILEKTHNGKLCDLDGVKPLILRDCSVAGWLLGNPMCDEFPNVSEWSYIVEKINPANDLCYPGNFNNYEELKHLLSRINRFEKIQIIPKSSWPDHEASLGVSSACPYQGEPSFYRNVVWLIKKNNTYPTIKENYHNTNQEDLLVLWGIHHPNDEEEQKRIYKNPTTYISVGTSTLTQRLVPKIATRPKVNGQSGRVEFFWTILKSNDTINFESNGNFIAPKNAYKIVKKGSSTIMKSELEYGNCSTKCQTPIGAINSSMPFHNIHPLTIGECPKYVKSNRLVLATGLRNSPQGEGRRKKRGLFGAIAGFIEGGWQGMVDGWYGYHHSNEQGTGYAADKESTQKAIDGVTNKVNSIIDKMNTQFEAVGREFNNLEKRIENLNKKMEDGFLDVWTYNAELLVLMENERTLDFHDSNVRNLYDKVRLQLRDNAKELGNGCFEFYHKCDNECMESVRNGTYDYPQYSKEARLKREEISGVKLESIGTYQILSIYSTVASSLALAIMVAGLSLWMCSNGSLQ

SEQ ID NO: 34 - protein, 554 aa, Influenza A virus
  MISC_FEATURE: subtype H5N1
  misc_feature (1)..(1): Xaa can be any naturally occurring amino acid
  misc_feature (554)..(554): Xaa can be any naturally occurring amino acid
XVKSDQICIGYHANNSTEQVDTIMEKNVTVTHAQDILEKTHNGKLCDLDGVKPLILRDCSVAGWLLGNPMCDEFPNVSEWSYIVEKINPANDLCYPGNFNNYEELKHLLSRINRFEKIQIIPKSSWPDHEASLGVSSACPYQGEPSFYRNVVWLIKKNNTYPTIKESYHNTNQEDLLVLWGIHHPNDEEEQKRIYKNPTTYISVGTSTLNQRLVPKIATRPKVNGQSGRVEFFWTILKSNDTINFESNGNFIAPKNAYKIVKKGSSTIMKSELEYGNCSTKCQTPIGAINSSMPFHNIHPLTIGECPKYVKSNRLVLATGLRNSPQGEGRRKKRGLFGAIAGFIEGGWQGMVDGWYGYHHSNEQGTGYAADKESTQKAIDGVTNKVNSIIDKMNTQFEAVGREFNNLEKRIENLNKKMEDGFLDVWTYNAELLVLMENERTLDFHDSNVRNLYDKVRLQLRDNAKELGNGCFEFYHKCDNECMESVRNGTYDYPQYSKEARLKREEISGVKLESIGTYQILSIYSTVASSLALAIMVAGLSLWMCSNGSLQCRX

SEQ ID NO: 35 - protein, 537 aa, Influenza A virus
  MISC_FEATURE: subtype H5N1
  misc_feature (1)..(1): Xaa can be any naturally occurring amino acid
  misc_feature (537)..(537): Xaa can be any naturally occurring amino acid
XSDQICIGYHANNSTEQVDTIMEKNVTVTHAQDILEKTHNGKLCDLDGVKPLILRDCSVAGWLLGNPMCDEFPNVSEWSYIVEKINPANDLCYPGNFNNYEELKHLLSRINRFEKIQIIPKSSWPDHEASLGVSSACPYQGEPSFYRNVVWLIKKNNTYPTIKENYHNTNQEDLLVLWGIHHPNDEEEQKRIYKNPTTYISVGTSTLNQRLVPKIATRPKVNGQSGRVEFFWTILKSNDTINFESNGNFIAPKNAYKIVKKGSSTIMKSELEYGNCSTKCQTPIGAINSSMPFHNIHPLTIGECPKYVKSNRLVLATGLRNSPQGEGRRKKRGLFGAIAGFIEGGWQGMVDGWYGYHHSNEQGTGYAADKESTQKAIDGVTNKVNSIIDKMNTQFEAVGREFNNLEKRIENLNKKMEDGFLDVWTYNAELLVLMENERTLDFHDSNVRNLYDKVRLQLRDNAKELGNGCFEFYHKCDNECMESVRNGTYDYPQYSKEARLKREEISGVKLESIGTYQILSIYSTVASSLALAIMVAX

SEQ ID NO: 36 - protein, 554 aa, Influenza A virus
  MISC_FEATURE: subtype H5N1
KGDQICIGYHANNSTEQVDTIMEKNVTVTHAQDILEKTHNGKLCDLDGVKPLILRDCSVAGWLLGNPMCDEFPNVSEWSYIVEKINPANDLCYPGNFNNYEELKHLLSRINRFEKIKIIPKSSWPDHEASLGVSSACPYQGGPSFYRNVVWLIKKNNTYPTIKESYHNTNQEDLLVLWGIHHPNDEEEQTRIYKNPNTYISVGTSTLNQRLVPKIATRSKVNGQSGRVEFFWTILKSNDTINFESNGNFIAPENAYKIVKKGDSTIMKSELEYGNCSTKCQTPIGAINSSMPFHNIHPLTIGECPKYVKSNRLVLATGLRNSPQEEGRRKKRGLFGAIAGFIEGGWQGMVDGWYGYHHSNEQGSGYAADKESTQKAIDGVTNKVNSIIDKMNTQFEAVGREFNNLEKRIENLNKKMEDGFLDVWTYNAELLVLMENERTLDFHDSNVKNLYDKVRLQLRDNAKELGNGCFEFYHRCDNECMESVRNGTYDYPQYSEEARLKREEISGVKLESIGTYQILSIYSTVASSLALAIMVAGLFLWMCSNGSLQCRICI

SEQ ID NO: 37 - protein, 511 aa, Influenza A virus
  MISC_FEATURE: subtype H5N1
  misc_feature (1)..(1): Xaa can be any naturally occurring amino acid
  misc_feature (182)..(182): Xaa can be any naturally occurring amino acid
  misc_feature (200)..(200): Xaa can be any naturally occurring amino acid
  misc_feature (511)..(511): Xaa can be any naturally occurring amino acid
XHANNSTEQVDTIMEKNITVTHAQDILEKTHNGKLCDLDGVKPLILRDCSVAGWLLGNPMCDEFLNVSEWSYIVEKINPANDLCYPGNFNNYEELKHLLSRINRFEKIQIISKNSWPDHEASLGVSAACPYQGGLSFYRNVVWLIEKNNTYPLIKKNYHNTNQEDLLVLWGIHHPNDEAEQXRLYKNSTTYISVGTSTLXQRLVPKIATRPKVNGQSGRVEFFWTILKSNDVINFESNGNFIAPENAYKIVKKGDSTIMKSDLEYGNCSTKCQTPIGAINSSMPFHNIHPLTIGECPKYVKSNRLVLATGLRNSPQGERRRKKRGLFGAIAGFIEGGWQGMVDGWYGYHHSNEQGSGYAADKESTQKAIDGVTNKVNSIIDKMNTQFEAVGREFNNLERRIENLNKKMEDGFLDVWTYNAELLVLMENERTLDFHDSNVKNLYDKVRLQLRDNAKELGNGCFEFYHRCDNECMESVRNGTYDYPQYSEEARLKREEISGAKLESIGTYQIX

SEQ ID NO: 38 - protein, 537 aa, Influenza A virus
  MISC_FEATURE: subtype H5N1
  misc_feature (1)..(1): Xaa can be any naturally occurring amino acid
XLVKSDQICIGYHANNSTEQVDTIMEKNVTVTHAQDILEKTHNGKLCDLDGVKPLILRDCSVAGWLLGNPMCDEFPNVSEWSYIVEKINPANDLCYPGNFNNYEELKHLLSRINRFEKIKIIPKSSWPDHEASLGVSSACPYQRGPSFYRNVVWLIKKNNTYPTIKKSYHNTNQEDLLVLWGIHHPNDEEEQTRIYKNPTTYISVGTSTLNQRLVPKIATRSKVNGQSGRVEFFWTILKSNDTINFESNGNFIAPENAYKIVKKGDSTIMKSELEYGNCNTKCQTPIGAINSSMPFHNIHPLTIGECPKYVKSNRLVLATGLRNSPQGEGRRKKRGLFGAIAGFIEGGWQGMVDGWYGYHHSNEQGSGYAADKESTQKAIDGVTNKVNSIIDKMNTQFEAVGREFNNLEKRIENLNKKMEDGFLDVWTYNAELLVLMENERTLDFHDSNVKNLYDKVRLQLRDNAKELGNGCFEFYHRCDNECMESVKNGTYDYPQYSEEARLKREEISGVKLESIGTYQILSIYSTVASSLALAIM

SEQ ID NO: 39 - protein, 534 aa, Influenza A virus
  MISC_FEATURE: subtype H5N1
KSDQICIGYHANNSTEQVDTIMEKNVTVTHAQDILEKTHNGKLCDLDGVKPLILRDCSVAGWLLGNPMCDEFPNVSEWSYIVEKINPANDLCYPGNFNNYEELKHLLSRINRFEKIQIIPKSSWPDHEASLGVSSACPYQGGPSFYRNVVWLIKKNDTYPTIKESYHNTNQEDLLVLWGIHHPNDEEEQKRIYKNPTTYISVGTSTLNQRLVPKIATRSKVNGQSGRVEFFWTILKSNDTINFESNGNFIAPENAYKIVKKGDSTIMKSELEYGNCSTKCQTPIGAINTSMPFHNIHPLTIGECPKYVKSNRLVLATGLRNSPQGEGRRKKRGLFGAIAGFIEGGWQGMVDGWYGYHHSNEQGSGYAADKESTQKAINGVTNKVNSIIDKMNTQFEAVGREFNNLEKRIENLNKKMEDGFLDVWTYNAELLVLMENERTLDFHDSNVRNLYDKVRLQLRDNAKELGNGCFEFYHRCDNECMESVRNGTYDYPQYSKEARLKREEISGVKLESIGTYQILSIYSTVASSLALAIM

SEQ ID NO: 40 - protein, 536 aa, Influenza A virus
  MISC_FEATURE: subtype H5N1
  misc_feature (1)..(1): Xaa can be any naturally occurring amino acid
  misc_feature (311)..(311): Xaa can be any naturally occurring amino acid
XVKSDQICIGYHANNSTEQVDTIMEKNVTVTHAQDILEKTHNGKLCDLDGVKPLILRDCSVAGWLLGNPMCDEFPNVSEWSYIVEKTNPANDLCYPGNFNNYEELKHLLSRINRFEKIKIIPKSSWPDHEASLGVSSACPYQGEPSFYRNVVWLIKKNNTYPTIKESYHNTNQEDLLVLWGIHHPNDEEEQTRIYKNPTTYISVGTSTLNQRLVPKIATRSKVNGQSGRVEFFWTILKSNDTINFESNGNFIAPENAYKIVKKGDSTIMKSELEYGNCSTKCQTPVGAINSSMPFHNIHPLTIGECPKYVXSNRLVLATGLRNSPQGEGRRKKRGLFGAIAGFIEGGWQGMVDGWYGYHHSNEQGSGYAADRESTQKAIDGVTNKVNSIIDKMNTQFEAVGREFNNLEKRIENLNKKMEDGFLDVWTYNAELLVLMENERTLDFHDSNVKNLYDKVRLQLRDNAKELGNGCFEFYHRCDNECIESVRNGTYDYPQYSEEARLKREEISGVKLESIGTYQILSIYSTVASSLALAIM

SEQ ID NO: 41 - protein, 515 aa, Influenza A virus
  MISC_FEATURE: subtype H5N1
  misc_feature (1)..(1): Xaa can be any naturally occurring amino acid
  misc_feature (515)..(515): Xaa can be any naturally occurring amino acid
XLVKSDQICIGYHANNSTEQVDTIMEKNVTVTHAQDILEKTHNGKLCDLDGVKPLILRDCSVAGWLLGNPMCDEFPNVSEWSYIVEKINPANDLCYPGNFNNYEELKHLLSRINRFEKIQIIPKSSWPDHEASLGVSSACPYQGGPSFYRNVVWLIKKNDTYPTIKESYHNTNQEDLLVLWGIHHPNDEEEQKRIYKNPTTYVSVGTSTLNQRLVPKIATRSKVNGQSGRVEFFWTILKSNDTINFESNGNFIAPENAYKIVKKGDSTIMKSELEYGNCSTKCQTPIGAINTSMPFHNIHPLTIGECPKYVKSNRLVLATGLRNSPQGEGRRKKRGLFGAIAGFIEGGWQGMVDGWYGYHHSNEQGSGYAADKESTQKAIDGVTNKVNSIIDKMNTQFEAVGREFNNLEKRIENLNKKMEDGFLDVWTYNAELLVLMENERTLDFHDSNVRNLYDKVRLQLRDNAKELGNGCFEFYHRCDNECMESVRNGTYDYPQYSEEARLKREEISGVKLEX

SEQ ID NO: 42 - protein, 519 aa, Influenza A virus
  MISC_FEATURE: subtype H5N1
  misc_feature (1)..(1): Xaa can be any naturally occurring amino acid
  misc_feature (517)..(517): Xaa can be any naturally occurring amino acid
XVKSDQICIGYHANNSTEQVDTIMEKNVTVTHAQDILEKTHNGKLCNLDGVKPLILRDCSVAGWLLGNPMCDKFLNVPEWSYIVEKINPANDLCYPGDFNDYEELKHLLSRINHFEKIQIIPKNSWSDHEASGVSSACPYQGRSSFFRNVVWLTKKNNAYPTIKKSYNNTNQEDLLVLWGIHHPNDAAEQTMLYQNPTTYVSVGTSTLNQRLVPKIATRSKVNGQSGRMEFFWTILKSNDAINFESNGNFIAPENAYKIVKKGDSTIMKSELEYGNCNTKCQTPIGAINSSMPFHNIHPLTIGECPKYVKSNRLVLATGLRNSPQGERRRKKRGLFGAIAGFIEGGWQGMVDGWYGYHHSNEQGSGYAADKESTQKAIDGVTNKVNSIIDKMNTQFEAVGREFNNLERRIENLNKKMEDGFLDVWTYNAELLVLMENERTLDFHDSNVKNLYDKVRLQLRDNAKELGNGCFEFYHRCDNECMESVRNGTYDYPQYSEEARLKREEISGVKLESIGTXQI

SEQ ID NO: 43 - protein, 510 aa, Influenza A virus
  MISC_FEATURE: subtype H5N1
  misc_feature (1)..(1): Xaa can be any naturally occurring amino acid
  misc_feature (507)..(507): Xaa can be any naturally occurring amino acid
  misc_feature (510)..(510): Xaa can be any naturally occurring amino acid
XHANNSTEQVDTIMEKNVTVTHAQDILEKTHNGKLCNLDGVKPLILRDCSVAGWLLGNPMCDEFPNVLEWSYIVEKINPANDLCYPGNFNDYEELKHLLSRINHFEKIQIIPKNSWSDHEASGVSSACPYQRRSSFFRNVVWLTKKNNAYPTIKKSYNNTNQEDLLVLWGIHHPNDAAEQTRLYQNPTTYISVGTSTLNQRLVPKIATRSKVNGQSGRMEFFWTILKSNDAINFESNGNFIAPENAYKIVKKGDSTIMKSELEYGNCNTKCQTPIGAINSSMPFHNIHPLTIGECPKYVKSNRLVLATGLRNSPQGERRRKKRGLFGAIAGFIEGGWQGMVDGWYGYHHSNEQGSGYAADKESTQKAIDGVTNKVNSIIDKMNTQFEAVGREFNNLERRIENLNKKMEDGFLDVWTYNAELLVLMENERTLDFHDSNVKNLYDKVRLQLRDNAKELGNGCFEFYHRCDNECMESVRNGTYDYPQYSEEARLKREEISGVKLESIGTXQIX

SEQ ID NO: 44 - protein, 523 aa, Influenza A virus
  MISC_FEATURE: subtype H5N1
  misc_feature (523)..(523): Xaa can be any naturally occurring amino acid
HANNSTEQVDTIMEKNVTVTHAQDILEKTHNGKLCDLDGVKPLILRDCSVAGWLLGNPMCDEFPNVSEWSYIVEKINPANDLCYPGNFNNYEELKHLLSRINRFEKIKIIPKSSWPDHEASLGVSSACPYQGGPSFYRNVVWLIKKNNTYPTIKKSYHNTNQEDLLVLWGIHHPNDEEEQTRIYKNPTTYISVGTSTLNQRLVPKIATRSKVNGQSGRVEFFWTILKSNDTINFESNGNFIAPENAYKIVKKGDSTIMKSELEYGNCNTKCQTPIGAINSSMPFHNIHPLTIGECPKYVKSNRLVLATGLRNSPQGEGRRKKRGLFGAIAGFIEGGWQGMVDGWYGYHHSNEQGSGYAADKESTQKAIDGVTNKVNSIIDKMNTQFEAVGREFNNLEKRIENLNKKMEDGFLDVWTYNAELLVLMENERTLDFHDSNVKNLYDKVRLQLRDNAKELGNGCFEFYHRCDNECMESVRNGTYDYPQYSEEARLKREEISGVKLESIGTYQILIYSTVASSLALAX

SEQ ID NO: 45 - protein, 541 aa, Influenza A virus
  MISC_FEATURE: subtype H5N1
LLAIVSLVKSDQICIGYHANNSTEQVDTIMEKNVTVTHAQDILEKTHNGKLCDLDGVKPLILRDCSVAGWLLGNPMCDEFPNVSEWSYIVEKINPANDLCYPGNFNNYEELKHLLSRINRFEKIKIIPKSSWPDHEASLGVSSACPYQGGPSFYRNVVWLIKKNNTYPTIKESYHNINKEDLLVLWGIHHPNDEEEQIRIYKNPTTYISVGTSTLNQRLVPKIATRSKVNGQSGRVEFFWTILKSNDTINFESNGNFIAPENAYKIVKKGDSTIMKSELEYGNCNTKCQTPIGAINSSMPFHNIHPLTIGECPKYVKSNRLVLATGLRNSPQGEGRRKKRGLFGAIAGFIEGGWQGMVDGWYGYHHSNEQGSGYAADKESTQKAIDGVTNKVNSIIDKMNTQFEAVGREFNNLEKRIENLNKKMEDGFLDVWTYNAELLVLMENERTLDFHDSNVKNLYDKVRLQLRDNAKELGNGCFEFYHRCDNECMESVRNGTYDYPQYSEEARLKREEISGVKLESIGTYQILSIYSTVASSLALAI

SEQ ID NO: 46 - protein, 555 aa, Influenza A virus
  MISC_FEATURE: subtype H5N1
  misc_feature (1)..(1): Xaa can be any naturally occurring amino acid
  misc_feature (555)..(555): Xaa can be any naturally occurring amino acid
XLAIVSLVKSDQICIGYHANNSTEQVDTIMEKNVTVTHAQDILEKTHNGKLCDLDGVKPLILRDCSVAGWLLGNPMCDEFPNVSEWSYIVEKINPANDLCYPGNFNNYEELKHLLSRINRFEKIKIIPKSSWPDHEASLGVSSACPYQGGPSFYRNVVWLTKKNNTYPTIKKSYHNINKEDLLVLWGIHHPNDEEEQIRIYKNPTTYISVGTSTLNQRLVPKIATRSKVNGQSGRVEFFWTILKSNDTINFESNGNFIAPENAYKIVKKGDSTIMKSELEYGNCNTKCQTPIGAINSSMPFHNIHPLTIGECPKYVKSNRLVLATGLRNSPQGEGRRKKRGLFGAIAGFIEGGWQGMVDGWYGYHHSNEQGSGYAADKESTQKAIDGVTNKVNSIIDKMNTQFEAVGREFNNLEKRIENLNKKMEDGFLDVWTYNAELLVLMENERTLDFHDSNVKNLYDKVRLQLRDNAKELGNGCFEFYHRCDNECMESVRNGTYDYPQYSEEARLKREEISGVKLESIGTYQILSIYSTVASSLALAIMMAGLFLWMCSNGX

SEQ ID NO: 47 - protein, 568 aa, Influenza A virus
  MISC_FEATURE: subtype H5N1
MEKIVLLLAIVSLVKSDQICIGYHANNSTEQVDTIMEKNVTVTHAQDILEKTHNGKLCDLDGVKPLILRDCSVAGWLLGNPMCDEFPNVSEWSYIVEKINPANDLCYPGNFNNYEELKHLLSRINRFEKIQIIPKSSWPDHEASLGVSSACPYQGGPSFYRNVVWLIKKNNTYPTIKESYHNTNQEDLLVLWGIHHPNDEEEQTRIYKNPTTYISVGTSTLNQRLVPKIATRSKVNGQSGRVEFFWTILKSNDTINFESNGNFIAPENAYKIVKKGDSTIMKSELEYGNCNTKCQTPIGAINSSMPFHNIHPLTIGECPKYVKSNRLVLATGLRNSPQGEGRRKKRGLFGAIAGFIEGGWQGMVDGWYGYHHSNEQGSGYAADKESTQKAIDGVTNKVNSIIDKMNTQFEAVGREFNNLEKRIENLNKKMEDGFLDVWTYNAELLVLMENERTLDFHDSNVKNLYDKVRLQLRDNAKELGNGCFEFYHRCDNECMESVRNGTYDYPQYSEEARLKREEISGVKLESIGTYQILSIYSTVASSLALAIMVAGLFLWMCSNGSLQCRICI

SEQ ID NO: 48 - DNA, 1620 bp, Influenza A virus
  misc_feature: subtype H5N1
caatagtcagtattgttaaaagtgatcagatttgcattggttaccatgcaaacaactcgacagagcaggttgacacaataatggaaaagaacgtcactgttacacacgcccaagacatactggaaaagacacacaacgggaaactctgcaatctagatggagtgaagcctctaattttaagagattgtagtgtagctggatggctcctagggaacccaatgtgcgacgaattcctcaatgtgccggaatggtcttacatagtggagaagatcaatccaaccaatgacctctgttatccagggaatttcaacgactatgaagaactgaaacacctattgagcagaataaaccattttgagaaaattcagatcattcccaaaaattcttggtcagatcatgaagcctcaggagtgagctcagcatgtccataccagggaagatcctccttttttagaaatgtggtatggcttaccaaaaagaacaatgcatacccaacaataaagaaaagttacaataataccaaccaagaagatcttttggtattatgggggattcaccatccaaatgatgcggcagagcagacaaggctttatcaaaacccaactacctatatttccgttgggacatcaacactaaaccagagattggtacccaaaatagctactagatctaaggtaaacgggcaaagtggaaggatggagttcttttggacaattttaaaatcgaatgatgcaataaactttgagagtaatggaaatttcattgctccagaaaatgcatacaaaattgtcaagaaaggggactcaacaattatgaaaagtgagttggaatatggtgactgcaacaccaagtgtcagactccaataggggcgataaactccagtatgccattccacaacatccaccctctcaccatcggggaatgccccaaatatgtgaaatcaaacagattagtccttgctactgggctcagaaatagccctcaaggagagagaagaagaaaaaagagaggactatttggagctatagcaggttttatagagggaggatggcagggaatggtagatggttggtatgggtaccaccatagcaacgagcaggggagtgggtacgctgcagacaaagaatccactcaaaaggcaatagatggagtcaccaataaggtcaactcgatcattgacaaaatgaacactcagtttgaggctgttgggagggaatttaataacttagaaaggagaatagaaaatttaaacaagaagatggaagacggattcctagatgtctggacttataatgctgaacttctggttctcatggaaaatgagagaactctagactttcatgactcaaatgtcaagaacctttatgacaaggtccgactacagcttagggataatgcaaaggagcttggtaacggttgtttcgagttctatcacagatgtgataatgaatgtatggaaagtgtaagaaacggtacgtatgactacccgcagtattcagaagaagcaagattaaaaagagaggaaataagtggagtaaaattggagtcaataggaacttaccaaatactgtcaatttattcaacagtggcgagctccctagcactggcaatcatggtgg

SEQ ID NO: 49 - DNA, 1707 bp, Influenza A virus
  misc_feature: subtype H5N1
atggagaaaatagtgcttcttcttgcaatagtcagtcttgttaaaagtgatcagatttgcattggttaccatgcaaacaactcaacagagcaggttgacacaataatggaaaagaacgtcactgttacacacgctcaagacatactggaaaagacacacaatgggaaactctgcgatctaggtggagtgaagcctctaattttaagagattgtagtgtagctggatggctcctcgggaacccaatgtgtgacgaattccccaatgtgtcggaatggtcctacatagtggagaagatcaatccagccaatgacctctgttacccagggaatttcaacaactatgaagaactgaaacatctattgagcagaataaaccggtttgagaaaattcagatcatccccaaaagttcttggccagatcatgaagcctcattaggagtgagctcagcatgtccataccagggaggaccctccttttatagaaatgtggtatggcttatcaaaaagaacgatacatacccaacaataaaggaaagttaccataataccaatcaagaagatcttttggtgctgtgggggatccaccatccaaataatgaggaagaacagaaaaggatctataaaaacccaactacctatgtttccgttgggacatcaacactaaaccagagattggtaccgaagatagccactagatctaaggtaaacgggcaaagtggaagagtggagttcttttggacaattttaaaatcaaatgatacaataaactttgagagtaatggaaatttcattgctccagaaaatgcatacaaaattgtcaagaaaggggactcaacaattatgaaaagtgagttggaatatggtaactgcagcaccaagtgtcaaactccaataggggcgataaacaccagtatgccattccacaacatccaccctctcaccatcggggaatgccccaaatatgtgaaatcaaacagattagtccttgctactgggcttagaaatagccctcaaggagagggaagaagaaaaaagagaggactatttggagctatagcaggttttatagagggaggatggcagggaatggtagatggttggtatgggtaccaccatagtaacgagcaggggagtgggtacgctgcagacaaagaatccactcaaaaggcaatagatggagtcaccaataaggtcaactcgatcattgacaaaatgaatactcagtttgaggctgttgggagggaatttaataacttggaaaagagaatagaaaatttaaacaagaagatggaagacgggttcctagatgtctggacttataatgctgaacttctggttctcatggaaaatgagagaactctagactttcatgactcaaatgtcaggaacctttacgacaaggtgcgactacagcttagggacaatgcaaaggagcttggtaacggttgtttcgagttctatcacagatgcgataatgaatgtatggaaagtgtaagaaacggaacgtatgactacccgcagtattcagaagaagcaagattaaaaagagaggaaataagtggagtaaaattggaatcaataggaacttaccaaatactatcaatttattcaacagtggcaagttccctagcactggcaatcatggtggctggtctatttttatggatgtgctccaatggatcgttacaatgcagaatttgcatttaa

SEQ ID NO: 50 - DNA, 1707 bp, Influenza A virus
  misc_feature: subtype H5N1
atggagaaaatagtgcttcttcttgcaatagtcagtcttgttaaaagtgatcagatttgcattggttaccatgcaaacaactcaacagagcaggttgacacaataatggaaaagaacgtcactgttacacacgctcaagacatactggaaaagacacacaacgggaaactctgcgatctagatggagtgaagcctctaattttaagagattgtagtgtagctggatggctcctcgggaacccaatgtgtgacgaattccccaatgtgtcggaatggtcctacatagtggagaagatcaatccagccaatgacctctgttacccagggaatttcaacaactatgaagaactgaaacacctattgagcagaataaaccggtttgagaaaattcagatcatccccaaaagttcttggccagatcatgaagcctcattaggagtgagctcagcatgtccataccagggaggaccctccttttatagaaatgtggtatggcttatcaaaaagaacaatacatacccaacaataaaggaaagttaccataataccaatcaagaagatcttttggtgctgtgggggattcaccatccaaatgatgaggaagagcagacaaggatctataaaaacccaactacctatatttccgttgggacatcaacactaaaccagagattggtaccaaagatagccactagatctaaggtaaacgggcaaagtggaagagtggagttcttttggacaattttaaaatcaaatgatacaataaactttgagagtaatggaaatttcattgctccagaaaatgcatacaaaattgtcaagaaaggggactcaacaattatgaaaagtgagttggaatatggtaactgcaacaccaagtgtcaaactccaataggggcgataaactccagtatgccattccacaacatccaccctctcaccatcggggaatgccccaaatatgtgaaatcaaacagattagtccttgctactgggctcagaaatagccctcaaggagagggaagaagaaaaaagagaggactatttggagctatagcaggttttatagagggaggatggcagggaatggtagatggttggtatgggtaccaccatagcaacgagcaggggagtgggtacgctgcagacaaagaatccactcaaaaggcaatagatggagtcaccaataaggtcaactcgatcattgacaaaatgaatactcagtttgaggctgttgggagggaatttaataacttggaaaagagaatagaaaatttaaacaagaagatggaagacgggttcctagatgtctggacttataatgctgaacttctggttctcatggaaaatgagagaactctagactttcatgactcaaatgtcaagaacctttacgacaaggtgcgactacagcttagggacaatgcaaaggagcttggtaacggttgtttcgagttctatcacagatgcgataatgaatgtatggaaagtgtaagaaacggaacgtatgactacccgcagtattcagaagaagcaagattaaaaagagaggaaataagtggagtaaaattggaatcaataggaacttaccaaatactatcaatttattcaacagtggcaagttccctagcactggcaatcatggtggctggtctatttttatggatgtgctccaatggatcgttacaatgcagaatttgcatttaa

SEQ ID NO: 51 - protein, 16 aa, Influenza A virus
  MISC_FEATURE: subtype H5N1
MEKIVLLLAIVSLVKS

SEQ ID NO: 52 - protein, 532 aa, Influenza A virus
  MISC_FEATURE: subtype H5N1
DQICIGYHANNSTEQVDTIMEKNVTVTHAQDILEKTHNGKLCNLDGVKPLILRDCSVAGWLLGNPMCDEFLNVPEWSYIVEKINPTNDLCYPGNFNDYEELKHLLSRINHFEKIQIIPKNSWSDHEASGVSSACPYQGRSSFFRNVVWLTKKNNAYPTIKKSYNNTNQEDLLVLWGIHHPNDAAEQTRLYQNPTTYISVGTSTLNQRLVPKIATRSKVNGQSGRMEFFWTILKSNDAINFESNGNFIAPENAYKIVKKGDSTIMKSELEYGDCNTKCQTPIGAINSSMPFHNIHPLTIGECPKYVKSNRLVLATGLRNSPQGERRRKKRGLFGAIAGFIEGGWQGMVDGWYGYHHSNEQGSGYAADKESTQKAIDGVTNKVNSIIDKMNTQFEAVGREFNNLERRIENLNKKMEDGFLDVWTYNAELLVLMENERTLDFHDSNVKNLYDKVRLQLRDNAKELGNGCFEFYHRCDNECMESVRNGTYDYPQYSEEARLKREEISGVKLESIGTYQILSIYSTVASSLALAIMV

SEQ ID NO: 53 - protein, 552 aa, Influenza A virus
  MISC_FEATURE: subtype H5N1
DQICIGYHANNSTEQVDTIMEKNVTVTHAQDILEKTHNGKLCDLGGVKPLILRDCSVAGWLLGNPMCDEFPNVSEWSYIVEKINPANDLCYPGNFNNYEELKHLLSRINRFEKIQIIPKSSWPDHEASLGVSSACPYQGGPSFYRNVVWLIKKNDTYPTIKESYHNTNQEDLLVLWGIHHPNNEEEQKRIYKNPTTYVSVGTSTLNQRLVPKIATRSKVNGQSGRVEFFWTILKSNDTINFESNGNFIAPENAYKIVKKGDSTIMKSELEYGNCSTKCQTPIGAINTSMPFHNIHPLTIGECPKYVKSNRLVLATGLRNSPQGEGRRKKRGLFGAIAGFIEGGWQGMVDGWYGYHHSNEQGSGYAADKESTQKAIDGVTNKVNSIIDKMNTQFEAVGREFNNLEKRIENLNKKMEDGFLDVWTYNAELLVLMENERTLDFHDSNVRNLYDKVRLQLRDNAKELGNGCFEFYHRCDNECMESVRNGTYDYPQYSEEARLKREEISGVKLESIGTYQILSIYSTVASSLALAIMVAGLFLWMCSNGSLQCRICI

SEQ ID NO: 54 - protein, 552 aa, Influenza A virus
  MISC_FEATURE: subtype H5N1
DQICIGYHANNSTEQVDTIMEKNVTVTHAQDILEKTHNGKLCDLDGVKPLILRDCSVAGWLLGNPMCDEFPNVSEWSYIVEKINPANDLCYPGNFNNYEELKHLLSRINRFEKIQIIPKSSWPDHEASLGVSSACPYQGGPSFYRNVVWLIKKNNTYPTIKESYHNTNQEDLLVLWGIHHPNDEEEQTRIYKNPTTYISVGTSTLNQRLVPKIATRSKVNGQSGRVEFFWTILKSNDTINFESNGNFIAPENAYKIVKKGDSTIMKSELEYGNCNTKCQTPIGAINSSMPFHNIHPLTIGECPKYVKSNRLVLATGLRNSPQGEGRRKKRGLFGAIAGFIEGGWQGMVDGWYGYHHSNEQGSGYAADKESTQKAIDGVTNKVNSIIDKMNTQFEAVGREFNNLEKRIENLNKKMEDGFLDVWTYNAELLVLMENERTLDFHDSNVKNLYDKVRLQLRDNAKELGNGCFEFYHRCDNECMESVRNGTYDYPQYSEEARLKREEISGVKLESIGTYQILSIYSTVASSLALAIMVAGLFLWMCSNGSLQCRICI

SEQ ID NO: 55 - protein, 42 aa, Influenza A virus
  MISC_FEATURE: subtype H5N1
IGTYQILSIYSTVASSLALAIMVAGLFLWMCSNGSLQCRICI

SEQ ID NO: 56 - protein, 4 aa, Influenza A virus
  MISC_FEATURE: subtype H5N1
IMVA

SEQ ID NO: 57 - protein, 4 aa, Influenza A virus
  MISC_FEATURE: subtype H5N1
IMMA

SEQ ID NO: 58 - protein, 42 aa, Influenza A virus; identical to SEQ ID NO: 55
  MISC_FEATURE: subtype H5N1

SEQ ID NO: 59 - protein, 42 aa, Influenza A virus
  MISC_FEATURE: subtype H5N1
IGTYQILSIYSTVASSLALAIMVAGLSLWMCSNGSLQCRICI

SEQ ID NO: 60 - protein, 42 aa, Influenza A virus
  MISC_FEATURE: subtype H5N1
IGTYQILSIYSTVASSLALAIMMAGLSLWMCSNGSLQCRICI

SEQ ID NO: 61 - protein, 4 aa, Influenza A virus
  MISC_FEATURE: subtype H5N1
ASGV

SEQ ID NO: 62 - protein, 551 aa, Influenza A virus
  MISC_FEATURE: subtype H5N1
DQICIGYHANNSTEQVDTIMEKNVTVTHAQDILEKTHNGKLCNLDGVKPLILRDCSVAGWLLGNPMCDEFLNVPEWSYIVEKINPANDLCYPGKFNDYEELKHLLSRINHFEKIQIIPRNSWSDHETSGVSSACQYQGRSSFFRNVVWLTKKDNAYSTIKRSYNNTNQEDLLVLWGIHHPNDAAEQTRLYQNPTTYISVGTSTLNQRLVPKIATRSKVNGQSGRMEFFWTILKSNDAINFESNGNFIAPENAYKIVKKGDSTIMKSELEYGNCNTKCQTPIGAINSSMPFHNIHPLTIGECPKYVKSNRLVLATGLRNSPQEERRRKKRGLFGAIAGFIEGGWQGMVDGWYGYHHSNEQGSGYAADKESTQKAIDGVTNKVNSIIDKMNTQFEAVGREFNNLERRIENLNKKMEDGFLDVWTYNAELLVLMENERTLDFHDSNVKNLYDKVRLQLRDNAKELGNGCFEFYHRCDNECMESVRNGTYDYPQYSEEARLKREEISGVKLESIGTYQILSIYSTVASSLALAIMVAGLFLWMCSNGSLQCRICI

SEQ ID NO: 63 - protein, 551 aa, Influenza A virus
  MISC_FEATURE: subtype H5N1
DQICIGYHANNSTEQVDTIMEKNVTVTHAQDILEKTHNGKLCNLDGVKPLILRDCSVAGWLLGNPMCDEFLNVPEWSYIVEKINPANDLCYPGNFNDYEELKHLLSRINHFEKIQIIPKGSWSDHEASGVSSACPYQGRSSFFRNVVWLTKKNNAYPTIKKSYNNTNQEDLLVLWGIHHPNDAAEQTRLYQNPTTYISVGTSTLNQRLVPKIATRSKVNGQSGRMEFFWTILKSNDAINFESNGNFIAPENAYKIVKKGDSTIMKSELEYGNCNTKCQTPIGAINSSMPFHNIHPLTIGECPKYVKSNRLVLATGLRNSPQGERRRKKRGLFGAIAGFIEGGWQGMVDGWYGYHHSNEQGSGYAADKESTQKAIDGVTNKVNSIIDKMNTQFEAVGREFNNLERRIENLNKKMEDGFLDVWTYNAELLVLMENERTLDFHDSNVKNLYDRVRLQLRDNAKELGNGCFEFYHRCDNECMESVRNGTYDYPQYSEEARLKREEISGVKLESIGTYQILSIYSTVASSLALAIMVAGLFLWMCSNGSLQCRICI

SEQ ID NO: 64 - protein, 544 aa, Influenza A virus
  MISC_FEATURE: subtype H5N1
  misc_feature (544)..(544): Xaa can be any naturally occurring amino acid
DQICIGYHANNSTEQVDTIMEKNVTVTHAQDILEKTHNGKLCNLDGVKPLILRDCSVAGWLLGNPMCDEFLNVPEWSYIVEKIYPANDLCYPGNFNDYEELKHLLSRINHFEKIQIIPKSSWSDHEASGVSSACPYQGRSSFFRNVVWLTKKDNAYPTIKKSYNNTNQEDLLILWGIHHPNDAAEQTRLYQNPTTYISVGTSTLNQRLVPKIATRSKVNGQSGRMEFFWTILKSNDAINFESNGNFIAPENAYKIVKKGDSTIMKSELEYGNCNTKCQTPIGAINSSMPFHNIHPLTIGECPKYVKSNRLVLATGLRNSPQGERRRKKRGLFGAIAGFIEGGWQGMVDGWYGYHHSNEQGSGYAADKESTQKAIDGVTNKVNSIIDKMNTQFEAVGREFNNLERRIENLNKKMEDGFLDVWTYNAELLVLMENERTLDFHDSNVKNLYDKVRLQLRDNAKELGNGCFEFYHRCDNECMESVRNGTYDYPQYSEEARLKREEISGVKLESIGTYQILSIYSTVASSLALAIMVAGLFLWMCSNGX

SEQ ID NO: 65 - protein, 533 aa, Influenza A virus
  MISC_FEATURE: subtype H5N1
  misc_feature (533)..(533): Xaa can be any naturally occurring amino acid
DQICIGYHANNSTEQVDTIMEKNVTVTHAQDILEKTHNGKLCNLDGVKPLILRDCSVAGWLLGNPMCDEFLDVPEWSYIVEKINPANDLCYPGNFNDYEELKHLLSRINHFEKIQIIPKNSWSDHETSGVSSACPYQGRSSFFRNVVWLTKKNTAYPTIKKSYNNTNQEDLLVLWGIHHPNDAAEQTRLYQNPTTYISVGTSTLNQRLVPKIATRSKVNGQSGRMEFFWTILKSNDAINFESNGNFIAPENAYKIVKKGDSTIMKSELEYGNCNTKCQTPIGAINSSMPFHNIHPLTIGECPKYVKSNRLVLATGLRNSPHGERRRKKRGLFGAIAGFIEGGWQGMVDGWYGYHHSNEQGSGYAADKESTQKAIDGVTNKVNSIIDKMNTQFEAVGREFNNLERRIENLNKKMEDGFLDVWTYNAELLVLMENERTLDFHDSNVKNLYDKVRLQLRDNAKELGNGCFEFYHRCDNECMESVRNGTYDYPQYSEEARLKREEISGVKLESIGTYQILSIYSTVASSLALAIMVX

SEQ ID NO: 66 - protein, 530 aa, Influenza A virus
  MISC_FEATURE: subtype H5N1
DQICIGYHANNSTEQVDTIMEKNVTVTHAQDILEKTHNGKLCNLDGVKPLILRDCSVAGWLLGNPMCDEFLNVEWSYIVEKINPTNDLCYPGNFNDYEELKHLLSRINHFEKIQIIPKNYWSDHETSGVSSACPYQGRPSFFRNVVWLTKKNNAYPTIKKSYNNTNQEDLLVLWGIHHPNDAAEQTRLYQNPTTYISVGTSTLNQRLVPKIATRSKVNGQSGRMEFFWTILKSNDAINFESNGNFIAPENAYKIVKKGDSTIMKSELEYGNCNTKCQTPIGAINSSMPFHNIHPLTIGECPKYVKSNRLVLATGLRNSPQGERRRKKRGLFGAIAGFIEGGWQGMVDGWYGYHHSNEQGSGYAADKESTQKAIDGVTNKVNSIIDKMNTQFEAVGREFNNLERRIENLNKKMEDGFLDVWTYNAELLVLMENERTLDFHDSNVKNLYDKVRLQLRDNAKELGNGCFEFYHRCDNECMESVRNGTYDYPQYSEEARLKREEISGVKLESIGTYQILSIYSTVASSLALAIM

SEQ ID NO: 67 - protein, 544 aa, Influenza A virus
  MISC_FEATURE: subtype H5N1
  misc_feature (544)..(544): Xaa can be any naturally occurring amino acid
DQICIGYHANNSTEQVDTIMEKNVTVTHAQDILEKTHNGKLCNLDGVKPLILRDCSVAGWLLGNPMCDKFLNVPEWSYIVEKINPTNDLCYPGNFNDYEELKHLLSRINHFEKIQIIPKNSWSDHEASGVSSACPYQGRSSFFRNVVWLTKKNNAYPTIKKSYNNTNQEDLLVLWGIHHPNDAAEQTRLYQNPTTYISVGTSTLNQRLVPKIATRSKVNGQSGRMEFFWTILKSNDAINFESNGNFIAPENAYKIVKKGDSTIMKSELEYGDCNTKCQTPIGAINSSMPFHNIHPLTIGECPKYVKSNRLVLATGLRNSPQGERRRKKRGLFGAIAGFIEGGWQGMVDGWYGYHHSNEQGSGYAADKESTQKAIDGVTNKVNSIIDKMNTQFEAVGREFNNLERRIENLNKKMEDGFLDVWTYNAELLVLMENERTLDFHDSNVKNLYDKVRLQLRDNAKELGNGCFEFYHRCDNECMESVRNGTYDYPQYSEEARLKREEISGVKLESIGTYQILSIYSTVASSLALAIMVAGLFLWMCSNGX

SEQ ID NO: 68 - protein, 533 aa, Influenza A virus
  MISC_FEATURE: subtype H5N1
  misc_feature (533)..(533): Xaa can be any naturally occurring amino acid
DQICIGYHANNSTEQVDTIMEKNVTVTHAQDILEKTHNGKLCNLDGVKPLILRDCSVAGWLLGNPMCDEFLNVPEWSYIVEKINPTNDLCYPGNFNDYEELKHLLSRINHFEKIQIIPKNSWSDHEASGVSSACPYQGRSSFFRNVVWLTKKNNAYPTIKKSYNNTNQEDLLVLWGIHHPNDAAEQTRLYQNPTTYISVGTSTLNQRLVPKIATRSKVNGQSGRMEFFWTILKSNDAINFESNGNFIAPENAYKIVKKGDSTIMKSELEYGDCNTKCQTPIGAINSSMPFHNIHPLTIGECPKYVKSNRLVLATGLRNSPQGERRRKKRGLFGAIAGFIEGGWQGMVDGWYGYHHSNEQGSGYAADKESTQKAIDGVTNKVNSIIDKMNTQFEAVGREFNNLERRIENLNKKMEDGFLDVWTYNAELLVLMENERTLDFHDSNVKNLYDKVRLQLRDNAKELGNGCFEFYHRCDNECMESVRNGTYDYPQYSEEARLKREEISGVKLESIGTYQILSIYSTVASSLALAIMVX

SEQ ID NO: 69 - protein, 516 aa, Influenza A virus
  MISC_FEATURE: subtype H5N1
  misc_feature (155)..(155): Xaa can be any naturally occurring amino acid
DQICIGYHANNSTEQVDTIMEKNVTVTHAQDILEKTHNGKLCNLDGVKPLILRDCSVAGWLLGNPMCDEFLNVPEWSYIVEKINPANDLCYPGNFNDYEELKHLLSRINHFEKIQIIPKNSWSDHEASGVSSACPYQGRSSFFRNVVWLTKKNNXYPTIKKSYNNTNQEDLLVLWGIHHPNDAAEQTKLYQNPTTYISVGTSTLNQRLVPKIATRSKVNGQSGRMEFFWTILKSNDAINFESNGNFIAPENAYKIVKKGDSTIMKSELEYGNCNTKCQTPIGAINSSMPFHNIHPLTIGECPKYVKSNRLVLATGLRNSPQGERRRKKRGLFGAIAGFIEGGWQGMVDGWYGYHHSNEQGSGYAADKESTQKAIDGVTNKVNSIIDKMNTQFEAVGREFNNLERRIENLNKKMEDGFLDVWTYNAELLVLMENERTLDFHDSNVKNLYDKVRLQLRDNAKELGNGCFEFYHRCDNECMESVRNGTYDYPQYSEEARLKREEISGVKLESIGTYQIL

SEQ ID NO: 70 - protein, 531 aa, Influenza A virus
  MISC_FEATURE: subtype H5N1
  misc_feature (531)..(531): Xaa can be any naturally occurring amino acid
DQICIGYHANNSTEQVDTIMEKNVTVTHAQDILEKTHNGKLCNLDGVKPLILRDCSVAGWLLGNPMCDEFLNVPEWSYIVEKINPANDLCYPGNFNDYEELKHLLSRINHFEKIQIIPKNSWSDHEASGVSSACPYQGRSSFFRNVVWLTKKNNAYPTIKKSYNNTNQEDLLVLWGIHHPNDEAEQTRLYQNPTTYISVGTSTLNQRLVPKIATRSKVNGQSGRMEFFWTILKSNDAINFESNGNFIAPENAYKIVKKGDSTIMKSELEYGNCNTKCQTPIGAINSSMPFHNIHPLTIGECPKYVKSNRLVLATGLRNSPQGERRRKKRGLFGAIAGFIEGGWQGMVDGWYGYHHSNEQGSGYAADKESTQKAIDGVTNKVNSIIDKMNTQFEAVGREFNNLERRIENLNKKMEDGFLDVWTYNAELLVLMENERTLDFHDSNVKNLYDKVRLQLRDNAKELGNGCFEFYHRCDNECMESVRNGTYDYPQYSEEARLKREEISGVKLESIGTYQILSIYSTVASSLALAIX

SEQ ID NO: 71 - protein, 520 aa, Influenza A virus
  MISC_FEATURE: subtype H5N1
  misc_feature (520)..(520): Xaa can be any naturally occurring amino acid
DQICIGYHANNSTEQVDTIMEKNVTVTHAQDILEKTHNGKLCNLDGVKPLILRDCSVAGWLLGNPMCDEFLNVPEWSYIVEKINPANDLCYPGNFNDYEELKHLLSRINHFEKIQIIPKNSWSDHEASGVSSACPYQGRSSFFRNVVWLTKKNNAYPTIKKSYNNTNQEDLLVLWGIHHPNDAAEQTRLYQNPTTYISVGTSTLNQRLVPKIANRSKVNGQSGRMEFFWTILKSNDAINFESNGNFIAPENAYKIVKKGDSTIMKSELEYGNCNTKCQTPIGAINSSMPFHNIHPLTIGECPKYVKSNRLVLATGLRNSPQGERRRKKRGLFGAIAGFIEGGWQGMVDGWYGYHHSNEQGSGYAADKESTQKAIDGVTNKVNSIIDKMNTQFEAVGREFNNLERRIENLNKKMEDGFLDVWTYNAELLVLMENERTLDFHDSNVKNLYDKVRLQLRDNAKELGNGCFEFYHRCDNECMESVRNGTYDYPQYSEEARLKREEISGVKLESIGTYQILSIYX

SEQ ID NO: 72 - protein, 531 aa, Influenza A virus
  MISC_FEATURE: subtype H5N1
  misc_feature (531)..(531): Xaa can be any naturally occurring amino acid
DQICIGYHANNSTEQVDTIMEKNVTVTHAQDILEKTHNGKLCNLDGVKPLILRDCSVAGWLLGNPMCDEFLNVPEWSYIVEKINPANDLCYPGNFNDYEELKHLLSRINHFEKIQIIPKNSWSDHEASGVSSACPYQGRSSFFRNVVWLTKKDNAYPTIKRSYNNTNQEDLLVLWGIHHPNDAAEQTRLYQNPTTYISVGTSTLNQRLVPKIATRSKVNGQSGRMEFFWTILKSNDAINFESNGNFIAPENAYKIVKKGDSTIMKSELEYGNCNTKCQTPIGAINSSMPFHNIHPLTIGECPKYVKSNRLVLATGLRNSPQGERRRKKRGLFGAIAGFIEGGWQGMVDGWYGYHHSNEQGSGYAADKESTQKAIDGVTNKVNSIIDKMNTQFEAVGREFNNLERRIENLNKKMEDGFLDVWTYNAELLVLMENERTLDFHDSNVKNLYDKVRLQLRDNAKELGNGCFEFYHRCDNECMESVRNGTYDYPQYSEEARLKREEISGVKLESIGTYQILSIYSTVASSLALAIX

SEQ ID NO: 73 - protein, 552 aa, Influenza A virus; identical to SEQ ID NO: 53
  MISC_FEATURE: subtype H5N1

SEQ ID NO: 74 - protein, 552 aa, Influenza A virus
  MISC_FEATURE: subtype H5N1
  misc_feature (359)..(359): Xaa can be any naturally occurring amino acid
DQICIGYHANNSTEQVDTIMEKNVTVTHAQDILEKTHNGKLCDLDGVKPLILRDCSVAGWLLGNPMCDEFPNVSEWSYIVEKTNPANDLCYPGNFNNYEELKHLLSRINRFEKIKIIPKSSWPDHEASLGVSSACPYQGEPSFYRNVVWLIKKNNTYPTIKESYHNTNQEDLLVLWGIHHPNDEEEQTRIYKNPTTYISVGTSTLNQRLVPKIATRSKVNGQSGRVEFFWTILKSNDTINFESNGNFIAPENAYKIVKKGDSTIMKSELEYGNCSTKCQTPVGAINSSMPFHNIHPLTIGECPKYVKSNRLVLATGLRNSPQGEGRRKKRGLFGAIAGFIEGGWQGMVDGWYGYHHSNXQGSGYAADRESTQKAIDGVTNKVNSIIDKMNTQFEAVGREFNNLEKRIENLNKKMEDGFLDVWTYNAELLVLMENERTLDFHDSNVKNLYDKVRLQLRDNAKELGNGCFEFYHRCDNECIESVRNGTYDYPQYSEEARLKREEISGVKLESIGTYQILSIYSTVASSLALAIIVAGLFLWMCSNGSLQCRICI

SEQ ID NO: 75 - protein, 552 aa, Influenza A virus
  MISC_FEATURE: subtype H5N1
DQICIGYHANNSTEQVDTIMEKNVTVTHAQDILEKTHNGKLCDLDGVKPLILRDCSVAGWLLGNPMCDEFPNVSEWSYIVEKINPANDLCYPGNFNNYEELKHLLSRINRFEKIKIIPKSSWPDHEASLGVSSACPYQRGPSFYRNVVWLIKKNNTYPTIKKSYHNTNQEDLLVLWGIHHPNDEEEQTRIYKNPTTYISVGTSTLNQRLVPKIATRSKVNGQSGRVEFFWTILKSNDTINFESNGNFIAPENAYKIVKKGDSTIMKSELEYGNCNTKCQTPIGAINSSMPFHNIHPLTIGECPKYVKSNRLVLATGLRNSPQGEGRRKKRGLFGAIAGFIEGGWQGMVDGWYGYHHSNEQGSGYAADKESTQKAIDGVTNKVNSIIDKMNTQFEAVGREFNNLEKRIENLNKKMEDGFLDVWTYNAELLVLMENERTLDFHDSNVKNLYDKVRLQLRDNAKELGNGCFEFYHRCDNECMESVRNGTYDYPQYSEEARLKREEISGVKLESIGTYQILSIYSTVASSLALAIMMAGLFLWMCSNGSLQCRICI

SEQ ID NO: 76 - protein, 552 aa, Influenza A virus
  MISC_FEATURE: subtype H5N1
DQICIGYHANNSTEQVDTIMEKNVTVTHAQDILEKTHNGKLCDLDGVKPLILRDCSVAGWLLGNPMCDEFPNVSEWSYIVEKINPANDLCYPGNFNNYEELKHLLSRINRFEKIKIIPKSSWPDHEASLGVSSACPYQGGPSFYRNVVWLIKKNNTYPTIKESYHNTNQEDLLVLWGIHHPNDEEEQTRIYKNPTTYISIGTSTLNQRLVPKIATRSKVNGQRGRVEFFWTILKSNDTINFESNGNFIAPENAYKIVKKGDSTIMKSELEYGNCNTKCQTPIGAINSSMPFHNIHPLTIGECPKYVKSNRLVLATGLRNSPQGEGRRKKRGLFGAIAGFIEGGWQGMVDGWYGYHHSNEQGSGYAADKESTQKAIDGVTNKVNSIIDKMNTQFEAVGREFNNLEKRIENLNKKMEDGFLDVWTYNAELLVLMENERTLDFHDSNVKNLYDKVRLQLRDNAKELGNGCFEFYHRCDNECMESVRNGTYDYPQYSEEARLKREEISGVKLESIGTYQILSIYSTVASSLALAIMMAGLFLWMCSNGSLQCRICI

SEQ ID NO: 77 - protein, 552 aa, Influenza A virus
  MISC_FEATURE: subtype H5N1
DQICIGYHANNSTEQVDTIMEKNVTVTHAQDILEKTHNGKLCDLDGVKPLILRDCSVAGWLLGNPMCDEFPNVSEWSYIVEKINPANDLCYPGNFNNYEELKHLLSRINRFEKIQIIPKSSWPDHEASLGVSSACPYQGEPSFYRNVVWLIKKNNTYPTIKESYHNTNQEDLLVLWGIHHPNDEEEQKRIYKNPTTYISVGTSTLNQRLVPKIATRPKVNGQSGRVEFFWTILKSNDTINFESNGNFIAPKNAYKIVKKGSSTIMKSELEYGNCSTKCQTPIGAINSSMPFHNIHPLTIGECPKYVKSNRLVLATGLRNSPQGEGRRKKRGLFGAIAGFIEGGWQGMVDGWYGYHHSNEQGTGYAADKESTQKAIDGVTNKVNSIIDKMNTQFEAVGREFNNLEKRIENLNKKMEDGFLDVWTYNAELLVLMENERTLDFHDSNVRNLYDKVRLQLRDNAKELGNGCFEFYHKCDNECMESVRNGTYDYPQYSKEARLKREEISGVKLESIGTYQILSIYSTVTSSLALAIMVAGLSLWMCSNGSLQCRICI

SEQ ID NO: 78 - protein, 540 aa, Influenza A virus
  MISC_FEATURE: subtype H5N1
  misc_feature (540)..(540): Xaa can be any naturally occurring amino acid
DQICIGYHANNSTEQVDTIMEKNVTVTHAQDILEKTHNGKLCDLDGVKPLILRDCSVAGWLLGNPMCDEFPNVSEWSYIVEKTNPANDLCYPGNFNNYEELKHLLSRINRFEKIKIIPKSSWPDHEASLGVSSACPYQGRPSFYRNVVWLIKKNNTYPTIKESYHNTNQEDLLVLWGIHHPNDEEEQTRIYKNPTTYISIGTSTLNQRLIPKIATRSKVNGQSGRVEFFWTILKSNDTINFESNGNFIAPENAYKIVKKGDSTIMKSELEYGNCNTKCQTPIGAINSSMPFHNIHPLTIGECPKYVKSNRLVLATGLRNSPQGEGRRKKRGLFGAIAGFIEGGWQGMVDGWYGYHHSNEQGSGYAADKESTQKAIDGVTNKVNSIIDKMNTQFEAVGREFNNLEKRIENLNKKMEDGFLDVWTYNAELLVLMENERTLDFHDSNVKNLYDKVRLQLRDNAKELGNGCFEFYHRCDNECMESVRNGTYDYPQYSEEARLKREEISGVKLESIGTYQILSIYSTVASSLALAIMMAGLFLWX

SEQ ID NO: 79 - protein, 543 aa, Influenza A virus
  MISC_FEATURE: subtype H5N1
  misc_feature (543)..(543): Xaa can be any naturally occurring amino acid
DQICIGYHANNSTEQVDTIMEKNVTVTHAQDILEKTHNGKLCDLDGVKPLILRDCSVAGWLLGNPMCDEFPNVSEWSYIVEKINPANDLCYPGNFNNYEELKHLLSRINRFEKIQIIPKSSWPDHEASLGVSSACPYQGEPSFYRNVVWLIKKNNTYPTIKENYHNTNQEDLLVLWGIHHPNDEEEQKRIYKNPTTYISVGTSTLNQRLVPKIATRPKVNGQSGRVEFFWTILKSNDTINFESNGNFIAPKNAYKIVKKGSSTIMKSELEYGNCSTKCQTPIGAINSSMPFHNIHPLTIGECPKYVKSNRLVLATGLRNSPQGEGRRKKRGLFGAIAGFIEGGWQGMVDGWYGYHHSNEQGTGYAADKESTQKAIDGVTNKVNSIIDKMNTQFEAVGREFNNLEKRIENLNKKMEDGFLDVWTYNAELLVLMENERTLDFHDSNVRNLYDKVRLQLRDNAKELGNGCFEFYHKCDNECMESVRNGTYDYPQYSKEARLKREEISGVKLESIGTYQILSIYSTVASSLALAIMVAGLSLWMCSX

SEQ ID NO: 80 - protein, 552 aa, Influenza A virus
  MISC_FEATURE: subtype H5N1
DQICIGYHANNSTEQVDTIMEKNVTVTHAQDILEKTHNGKLCDLDGVKPLILRDCSVAGWLLGNPMCDEFPNVSEWSYIVEKINPANDLCYPGNFNNYEELKHLLSRINRFEKIQIIPKSSWPDHEASLGVSSACPYQGEPSFYRNVVWLIKKNNTYPTIKENYHNTNQEDLLVLWGIHHPNDEEEQKRIYKNPTTYISVGTSTLNQRLVPKIATRPKVNGQSGRVEFFWTILKSNDTINFESNGNFIAPKNAYKIVKKGSSTIMKSELEYGNCSTKCQTPIGAINSSMPFHNIHPLTIGECPKYVKSNRLVLATGLRNSPQGEGRRKKRGLFGAIAGFIEGGWQGMVDGWYGYHHSNEQGTGYAADKESTQKAIDGVTNKVNSIIDKMNTQFEAVGREFNNLEKRIENLNKKMEDGFLDVWTYNAELLVLMENERTLDFHDSNVRNLYDKVRLQLRDNAKELGNGCFEFYHKCDNECMESVRNGTYDYPQYSKEARLKREEISGVKLESIGTYQILSIYSTVASSLALAIMVAGLSLWMCSNGSLQCRICI

SEQ ID NO: 81 - protein, 540 aa, Influenza A virus
  MISC_FEATURE: subtype H5N1
DQICIGYHANNSTEQVDTIMEKNVTVTHAQDILEKTHNGKLCDLDGVKPLILRGCSVAGWLLGNPMCDEFPNVSEWSYIVEKINPANDLCYPGNFNNYEELKHLLSRINRFEKIQIIPKSSWPDHEASLGVSSACPYQGEPSFYRNVVWLIKKNNTYPTIKESYHNTNQEDLLVLWGIHHPNDEEEQKRIYKNPTTYISVGTSTLNQRLVPKIATRPKVNGQSGRVEFFWTILKSNDTINFESNGNFIAPKNAYKIVKKGSSTIMKSELEYGNCSTKCQTPIGAINSSMPFHNIHPLTIGECPKYVKSNRLVLATGLRNSPQGEGRRKKRGLFGAIAGFIEGGWQGMVDGWYGYHHSNEQGTGYAADKESTQKAIDGVTNKVNSIIDKMNTQFEAVGREFNNLEKRIENLNKKMEDGFLDVWTYNAELLVLMENERTLDFHDSNVRNLYDKVRLQLRDNAKELGNGCFEFYHKCDNECMESVRNGTYDYPQYSKEARLKREEISGVKLESIGTYQILSIYSTVASSLALAIMVAGLSLWM

SEQ ID NO: 82 - protein, 545 aa, Influenza A virus
  MISC_FEATURE: subtype H5N1
  misc_feature (545)..(545): Xaa can be any naturally occurring amino acid
DQICIGYHANNSTEQVDTIMEKNVTVTHAQDILEKTHNGKLCDLDGVKPLILRDCSVAGWLLGNPMCDEFPNVSEWSYIVEKINPANDLCYPGNFNNYEELKHLLSRINRFEKIKIIPKSSWPDHEASLGVSSACPYQGGPSFYRNVVWLIKKNNTYPTIKKSYHNTNQEDLLVLWGIHHPNDEEEQTRIYKNPTTYISVGTSTLNQRLVPKIATRSKVNGQSGRVEFFWTILKSNDTINFESNGNFIAPENAYKIVKKGDSTIMKSELEHGNCNTKCQTPIGAINSSMPFHNIHPLTIGECPKYVKSNRLVLATGLRNSPQGEGRRKKRGLFGAIAGFIEGGWQGMVDGWYGYHHSNEQGSGYAADKESTQKAIDGVTNKVNSIIDKMNTQFEAVGREFNNLEKRIENLNKKMEDGFLDVWTYNAELLVLMENERTLDFHDSNVKNLYDKVRLQLRDNAKELGNGCFEFYHRCDNECMESVRNGTYDYPQYSEEARLNREEISGVKLESIGTYQILSIYSTVASSLALAIMMAGLFLWMCSNGX

SEQ ID NO: 83 - protein, 547 aa, Influenza A virus
  MISC_FEATURE: subtype H5N1
  misc_feature (120)..(120): Xaa can be any naturally occurring amino acid
DQICIGYHANNSTEQVDTIMEKNVTVTHAQDILEKTHNGKLCDLDGVKPLILRDCSVAGWLLGNPMCDEFPNVSEWSYIVEKINPANDLCYPGNFNNYEELKHLLSRINRFEKIKIIPKXSWPDHEASLGVSSACPYQGGPSFYRNVVWLIKKNNTYPTIKESYHNTNQEDLLVLWGIHHPNDEEEQTRIYKNPTTYISIGTSTLNQRLVPKIATRSKVNGQSGRVEFFWTILKSNDTINFESNGNFIAPENAYKIVKKGDSTIMKSELEYGNCNTKCQTPIGAINSSMPFHNIHPLTIGECPKYVKSNRLVLATGLRNSPQGEGRRKKRGLFGAIAGFIEGGWQGMVDGWYGYHHSNEQGSGYAADKESTQKAIDGVTNKVNSIIDKMNTQFEAVGREFNNLEKRIENLNKKMEDGFLDVWTYNAELLVLMENERTLDFHDSNVKNLYDKVRLQLRDNAKELGNGCFEFYHRCDNECMESVRNGTYDYPQYSEEARLKREEISGVKLESIGTYQILSIYSTVAGSLALAIMMAGLFLWMCSNGSLQ

SEQ ID NO: 84 - protein, 534 aa, Influenza A virus
  MISC_FEATURE: subtype H5N1
  misc_feature (534)..(534): Xaa can be any naturally occurring amino acid
DQICIGYHANNSTEQVDTIMEKNVTVTHAQDILEKTHNGKLCDLDGVKPLILRDCSVAGWLLGNPMCDEFPNVSEWSYIVEKINPANDLCYPGNFNNYEELKHLLSRINRFEKIKIIPKSSWPDHEASLGVSSACPYQEGPSFYRNVVWLIKKNNTYPTIKKSYHNTNQEDLLVLWGIHHPNDEEEQTRIYKNPTTYISVGTSTLNQRLVPKIATRSKVNGQSGRVEFFWTILKSNDTINFESNGNFIAPENAYKIVKKGDSTIMKSELEYGNCNTKCQTPIGAINSSMPFHNIHPLTIGECPKYVKSNRLVLATGLRNSPQGEGRRKKRGLFGAIAGFIEGGWQGMVDGWYGYHHSNEQGSGYAADKESTQKAIDGVTNKVNSIIDKMNTQFEAVGREFNNLEKRIENLNKKMEDGFLDVWTYNAELLVLMENERTLDFHDSNVKNLYDKVRLQLRDNAKELGNGCFEFYHRCDNECMESVRNGTYDYPQYSEEARLKREEISGVKLESIGTYQILSIYSTVASSLALAIMVX

SEQ ID NO: 85 - protein, 534 aa, Influenza A virus
  MISC_FEATURE: subtype H5N1
  misc_feature (141)..(141): Xaa can be any naturally occurring amino acid
  misc_feature (316)..(316): Xaa can be any naturally occurring amino acid
  misc_feature (534)..(534): Xaa can be any naturally occurring amino acid
DQICIGYHANNSTEQVDTIMEKNVTVTHAQDILEKTHNGKLCDLDGVKPLILRDCSVAGWLLGNPMCDEFPNVSEWSYIVEKINPANDLCYPGNFNNYEELKHLLSRINRFEKIKIIPKSSWPDHEASLGVSSACPYQGGXSFYRNVVWLIKKNNTYPTIKESYHNTNQEDLLVLWGIHHPNDEEEQTRIYKNPTTYISIGTSTLNQRLVPKIATRSKVNGQSGRVEFFWTILKSNDTINFESNGNFIAPENAYKIVKKGDSTIMKSELEYGNCNTKCQTPIGAINSSMPFHNIHPLTIGECPKYVKSNRLVLATXLRNSPQGEGRRKKRGLFGAIAGFIEGGWQGMVDGWYGYHHSNEQGSGYAADKESTQKAIDGVTNKVNSIIDKMNTQFEAVGREFNNLEKRIENLNKKMEDGFLDVWTYNAELLVLMENERTLDFHDSNVKNLYDKVRLQLRDNAKELGNGCFEFYHRCDNECMESVRNGTYDYPQYSEEARLKREEISGVKLESIGTYQILSIYSTVAGSLALAIMVX

SEQ ID NO: 86 - protein, 547 aa, Influenza A virus
  MISC_FEATURE: subtype H5N1
DQICIGYHANNSTEQVDTIMEKNVTVTHAQDILEKTHNGKLCDLDGVKPLILRDCSVAGWLLGNPMCDEFPNVSEWSYIVEKINPANDLCYPGNFNNYEELKHLLSRINRFEKIQIIPKSSWPDHEASLGVSSACPYQGEPSFYRNVVWLIKKNNTYPTIKENYHNTNQEDLLVLWGIHHPNDEEEQKRIYKNPTTYISVGTSTLTQRLVPKIATRPKVNGQSGRVEFFWTILKSNDTINFESNGNFIAPKNAYKIVKKGSSTIMKSELEYGNCSTKCQTPIGAINSSMPFHNIHPLTIGECPKYVKSNRLVLATGLRNSPQGEGRRKKRGLFGAIAGFIEGGWQGMVDGWYGYHHSNEQGTGYAADKESTQKAIDGVTNKVNSIIDKMNTQFEAVGREFNNLEKRIENLNKKMEDGFLDVWTYNAELLVLMENERTLDFHDSNVRNLYDKVRLQLRDNAKELGNGCFEFYHKCDNECMESVRNGTYDYPQYSKEARLKREEISGVKLESIGTYQILSIYSTVASSLALAIMVAGLSLWMCSNGSLQ

SEQ ID NO: 87 - protein, 550 aa, Influenza A virus
  MISC_FEATURE: subtype H5N1
  misc_feature (550)..(550): Xaa can be any naturally occurring amino acid
DQICIGYHANNSTEQVDTIMEKNVTVTHAQDILEKTHNGKLCDLDGVKPLILRDCSVAGWLLGNPMCDEFPNVSEWSYIVEKINPANDLCYPGNFNNYEELKHLLSRINRFEKIQIIPKSSWPDHEASLGVSSACPYQGEPSFYRNVVWLIKKNNTYPTIKESYHNTNQEDLLVLWGIHHPNDEEEQKRIYKNPTTYISVGTSTLNQRLVPKIATRPKVNGQSGRVEFFWTILKSNDTINFESNGNFIAPKNAYKIVKKGSSTIMKSELEYGNCSTKCQTPIGAINSSMPFHNIHPLTIGECPKYVKSNRLVLATGLRNSPQGEGRRKKRGLFGAIAGFIEGGWQGMVDGWYGYHHSNEQGTGYAADKESTQKAIDGVTNKVNSIIDKMNTQFEAVGREFNNLEKRIENLNKKMEDGFLDVWTYNAELLVLMENERTLDFHDSNVRNLYDKVRLQLRDNAKELGNGCFEFYHKCDNECMESVRNGTYDYPQYSKEARLKREEISGVKLESIGTYQILSIYSTVASSLALAIMVAGLSLWMCSNGSLQCRX

SEQ ID NO: 88 - protein, 535 aa, Influenza A virus
  MISC_FEATURE: subtype H5N1
  misc_feature (535)..(535): Xaa can be any naturally occurring amino acid
DQICIGYHANNSTEQVDTIMEKNVTVTHAQDILEKTHNGKLCDLDGVKPLILRDCSVAGWLLGNPMCDEFPNVSEWSYIVEKINPANDLCYPGNFNNYEELKHLLSRINRFEKIQIIPKSSWPDHEASLGVSSACPYQGEPSFYRNVVWLIKKNNTYPTIKENYHNTNQEDLLVLWGIHHPNDEEEQKRIYKNPTTYISVGTSTLNQRLVPKIATRPKVNGQSGRVEFFWTILKSNDTINFESNGNFIAPKNAYKIVKKGSSTIMKSELEYGNCSTKCQTPIGAINSSMPFHNIHPLTIGECPKYVKSNRLVLATGLRNSPQGEGRRKKRGLFGAIAGFIEGGWQGMVDGWYGYHHSNEQGTGYAADKESTQKAIDGVTNKVNSIIDKMNTQFEAVGREFNNLEKRIENLNKKMEDGFLDVWTYNAELLVLMENERTLDFHDSNVRNLYDKVRLQLRDNAKELGNGCFEFYHKCDNECMESVRNGTYDYPQYSKEARLKREEISGVKLESIGTYQILSIYSTVASSLALAIMVAX

SEQ ID NO: 89 - protein, 552 aa, Influenza A virus
  MISC_FEATURE: subtype H5N1
DQICIGYHANNSTEQVDTIMEKNVTVTHAQDILEKTHNGKLCDLDGVKPLILRDCSVAGWLLGNPMCDEFPNVSEWSYIVEKINPANDLCYPGNFNNYEELKHLLSRINRFEKIKIIPKSSWPDHEASLGVSSACPYQGGPSFYRNVVWLIKKNNTYPTIKESYHNTNQEDLLVLWGIHHPNDEEEQTRIYKNPNTYISVGTSTLNQRLVPKIATRSKVNGQSGRVEFFWTILKSNDTINFESNGNFIAPENAYKIVKKGDSTIMKSELEYGNCSTKCQTPIGAINSSMPFHNIHPLTIGECPKYVKSNRLVLATGLRNSPQEEGRRKKRGLFGAIAGFIEGGWQGMVDGWYGYHHSNEQGSGYAADKESTQKAIDGVTNKVNSIIDKMNTQFEAVGREFNNLEKRIENLNKKMEDGFLDVWTYNAELLVLMENERTLDFHDSNVKNLYDKVRLQLRDNAKELGNGCFEFYHRCDNECMESVRNGTYDYPQYSEEARLKREEISGVKLESIGTYQILSIYSTVASSLALAIMVAGLFLWMCSNGSLQCRICI

SEQ ID NO: 90 - protein, 517 aa, Influenza A virus
  MISC_FEATURE: subtype H5N1
  misc_feature (7)..(7): Xaa can be any naturally occurring amino acid
  misc_feature (188)..(188): Xaa can be any naturally occurring amino acid
  misc_feature (206)..(206): Xaa can be any naturally occurring amino acid
  misc_feature (517)..(517): Xaa can be any naturally occurring amino acid
DQICIGXHANNSTEQVDTIMEKNITVTHAQDILEKTHNGKLCDLDGVKPLILRDCSVAGWLLGNPMCDEFLNVSEWSYIVEKINPANDLCYPGNFNNYEELKHLLSRINRFEKIQIISKNSWPDHEASLGVSAACPYQGGLSFYRNVVWLIEKNNTYPLIKKNYHNTNQEDLLVLWGIHHPNDEAEQXRLYKNSTTYISVGTSTLXQRLVPKIATRPKVNGQSGRVEFFWTILKSNDVINFESNGNFIAPENAYKIVKKGDSTIMKSDLEYGNCSTKCQTPIGAINSSMPFHNIHPLTIGECPKYVKSNRLVLATGLRNSPQGERRRKKRGLFGAIAGFIEGGWQGMVDGWYGYHHSNEQGSGYAADKESTQKAIDGVTNKVNSIIDKMNTQFEAVGREFNNLERRIENLNKKMEDGFLDVWTYNAELLVLMENERTLDFHDSNVKNLYDKVRLQLRDNAKELGNGCFEFYHRCDNECMESVRNGTYDYPQYSEEARLKREEISGAKLESIGTYQIX

SEQ ID NO: 91 - protein, 532 aa, Influenza A virus
  MISC_FEATURE: subtype H5N1
DQICIGYHANNSTEQVDTIMEKNVTVTHAQDILEKTHNGKLCDLDGVKPLILRDCSVAGWLLGNPMCDEFPNVSEWSYIVEKINPANDLCYPGNFNNYEELKHLLSRINRFEKIKIIPKSSWPDHEASLGVSSACPYQRGPSFYRNVVWLIKKNNTYPTIKKSYHNTNQEDLLVLWGIHHPNDEEEQTRIYKNPTTYISVGTSTLNQRLVPKIATRSKVNGQSGRVEFFWTILKSNDTINFESNGNFIAPENAYKIVKKGDSTIMKSELEYGNCNTKCQTPIGAINSSMPFHNIHPLTIGECPKYVKSNRLVLATGLRNSPQGEGRRKKRGLFGAIAGFIEGGWQGMVDGWYGYHHSNEQGSGYAADKESTQKAIDGVTNKVNSIIDKMNTQFEAVGREFNNLEKRIENLNKKMEDGFLDVWTYNAELLVLMENERTLDFHDSNVKNLYDKVRLQLRDNAKELGNGCFEFYHRCDNECMESVKNGTYDYPQYSEEARLKREEISGVKLESIGTYQILSIYSTVASSLALAIM

SEQ ID NO: 92 - protein, 532 aa, Influenza A virus
  MISC_FEATURE: subtype H5N1
DQICIGYHANNSTEQVDTIMEKNVTVTHAQDILEKTHNGKLCDLDGVKPLILRDCSVAGWLLGNPMCDEFPNVSEWSYIVEKINPANDLCYPGNFNNYEELKHLLSRINRFEKIQIIPKSSWPDHEASLGVSSACPYQGGPSFYRNVVWLIKKNDTYPTIKESYHNTNQEDLLVLWGIHHPNDEEEQKRIYKNPTTYISVGTSTLNQRLVPKIATRSKVNGQSGRVEFFWTILKSNDTINFESNGNFIAPENAYKIVKKGDSTIMKSELEYGNCSTKCQTPIGAINTSMPFHNIHPLTIGECPKYVKSNRLVLATGLRNSPQGEGRRKKRGLFGAIAGFIEGGWQGMVDGWYGYHHSNEQGSGYAADKESTQKAINGVTNKVNSIIDKMNTQFEAVGREFNNLEKRIENLNKKMEDGFLDVWTYNAELLVLMENERTLDFHDSNVRNLYDKVRLQLRDNAKELGNGCFEFYHRCDNECMESVRNGTYDYPQYSKEARLKREEISGVKLESIGTYQILSIYSTVASSLALAIM

SEQ ID NO: 93 - protein, 532 aa, Influenza A virus
  MISC_FEATURE: subtype H5N1
  misc_feature (307)..(307): Xaa can be any naturally occurring amino acid
DQICIGYHANNSTEQVDTIMEKNVTVTHAQDILEKTHNGKLCDLDGVKPLILRDCSVAGWLLGNPMCDEFPNVSEWSYIVEKTNPANDLCYPGNFNNYEELKHLLSRINRFEKIKIIPKSSWPDHEASLGVSSACPYQGEPSFYRNVVWLIKKNNTYPTIKESYHNTNQEDLLVLWGIHHPNDEEEQTRIYKNPTTYISVGTSTLNQRLVPKIATRSKVNGQSGRVEFFWTILKSNDTINFESNGNFIAPENAYKIVKKGDSTIMKSELEYGNCSTKCQTPVGAINSSMPFHNIHPLTIGECPKYVXSNRLVLATGLRNSPQGEGRRKKRGLFGAIAGFIEGGWQGMVDGWYGYHHSNEQGSGYAADRESTQKAIDGVTNKVNSIIDKMNTQFEAVGREFNNLEKRIENLNKKMEDGFLDVWTYNAELLVLMENERTLDFHDSNVKNLYDKVRLQLRDNAKELGNGCFEFYHRCDNECIESVRNGTYDYPQYSEEARLKREEISGVKLESIGTYQILSIYSTVASSLALAIM

SEQ ID NO: 94 - protein, 510 aa, Influenza A virus
  MISC_FEATURE: subtype H5N1
  misc_feature (510)..(510): Xaa can be any naturally occurring amino acid
DQICIGYHANNSTEQVDTIMEKNVTVTHAQDILEKTHNGKLCDLDGVKPLILRDCSVAGWLLGNPMCDEFPNVSEWSYIVEKINPANDLCYPGNFNNYEELKHLLSRINRFEKIQIIPKSSWPDHEASLGVSSACPYQGGPSFYRNVVWLIKKNDTYPTIKESYHNTNQEDLLVLWGIHHPNDEEEQKRIYKNPTTYVSVGTSTLNQRLVPKIATRSKVNGQSGRVEFFWTILKSNDTINFESNGNFIAPENAYKIVKKGDSTIMKSELEYGNCSTKCQTPIGAINTSMPFHNIHPLTIGECPKYVKSNRLVLATGLRNSPQGEGRRKKRGLFGAIAGFIEGGWQGMVDGWYGYHHSNEQGSGYAADKESTQKAIDGVTNKVNSIIDKMNTQFEAVGREFNNLEKRIENLNKKMEDGFLDVWTYNAELLVLMENERTLDFHDSNVRNLYDKVRLQLRDNAKELGNGCFEFYHRCDNECMESVRNGTYDYPQYSEEARLKREEISGVKLEX

SEQ ID NO: 95 - protein, 515 aa, Influenza A virus
  MISC_FEATURE: subtype H5N1
  misc_feature (513)..(513): Xaa can be any naturally occurring amino acid
DQICIGYHANNSTEQVDTIMEKNVTVTHAQDILEKTHNGKLCNLDGVKPLILRDCSVAGWLLGNPMCDKFLNVPEWSYIVEKINPANDLCYPGDFNDYEELKHLLSRINHFEKIQIIPKNSWSDHEASGVSSACPYQGRSSFFRNVVWLTKKNNAYPTIKKSYNNTNQEDLLVLWGIHHPNDAAEQTMLYQNPTTYVSVGTSTLNQRLVPKIATRSKVNGQSGRMEFFWTILKSNDAINFESNGNFIAPENAYKIVKKGDSTIMKSELEYGNCNTKCQTPIGAINSSMPFHNIHPLTIGECPKYVKSNRLVLATGLRNSPQGERRRKKRGLFGAIAGFIEGGWQGMVDGWYGYHHSNEQGSGYAADKESTQKAIDGVTNKVNSIIDKMNTQFEAVGREFNNLERRIENLNKKMEDGFLDVWTYNAELLVLMENERTLDFHDSNVKNLYDKVRLQLRDNAKELGNGCFEFYHRCDNECMESVRNGTYDYPQYSEEARLKREEISGVKLESIGTXQI

SEQ ID NO: 96 - protein, 516 aa, Influenza A virus
  MISC_FEATURE: subtype H5N1
  misc_feature (7)..(7): Xaa can be any naturally occurring amino acid
  misc_feature (513)..(513): Xaa can be any naturally occurring amino acid
  misc_feature (516)..(516): Xaa can be any naturally occurring amino acid
DQICIGXHANNSTEQVDTIMEKNVTVTHAQDILEKTHNGKLCNLDGVKPLILRDCSVAGWLLGNPMCDEFPNVLEWSYIVEKINPANDLCYPGNFNDYEELKHLLSRINHFEKIQIIPKNSWSDHEASGVSSACPYQRRSSFFRNVVWLTKKNNAYPTIKKSYNNTNQEDLLVLWGIHHPNDAAEQTRLYQNPTTYISVGTSTLNQRLVPKIATRSKVNGQSGRMEFFWTILKSNDAINFESNGNFIAPENAYKIVKKGDSTIMKSELEYGNCNTKCQTPIGAINSSMPFHNIHPLTIGECPKYVKSNRLVLATGLRNSPQGERRRKKRGLFGAIAGFIEGGWQGMVDGWYGYHHSNEQGSGYAADKESTQKAIDGVTNKVNSIIDKMNTQFEAVGREFNNLERRIENLNKKMEDGFLDVWTYNAELLVLMENERTLDFHDSNVKNLYDKVRLQLRDNAKELGNGCFEFYHRCDNECMESVRNGTYDYPQYSEEARLKREEISGVKLESIGTXQIX

SEQ ID NO: 97 - protein, 530 aa, Influenza A virus
  MISC_FEATURE: subtype H5N1
  misc_feature (530)..(530): Xaa can be any naturally occurring amino acid
DQICIGYHANNSTEQVDTIMEKNVTVTHAQDILEKTHNGKLCDLDGVKPLILRDCSVAGWLLGNPMCDEFPNVSEWSYIVEKINPANDLCYPGNFNNYEELKHLLSRINRFEKIKIIPKSSWPDHEASLGVSSACPYQGGPSFYRNVVWLIKKNNTYPTIKKSYHNTNQEDLLVLWGIHHPNDEEEQTRIYKNPTTYISVGTSTLNQRLVPKIATRSKVNGQSGRVEFFWTILKSNDTINFESNGNFIAPENAYKIVKKGDSTIMKSELEYGNCNTKCQTPIGAINSSMPFHNIHPLTIGECPKYVKSNRLVLATGLRNSPQGEGRRKKRGLFGAIAGFIEGGWQGMVDGWYGYHHSNEQGSGYAADKESTQKAIDGVTNKVNSIIDKMNTQFEAVGREFNNLEKRIENLNKKMEDGFLDVWTYNAELLVLMENERTLDFHDSNVKNLYDKVRLQLRDNAKELGNGCFEFYHRCDNECMESVRNGTYDYPQYSEEARLKREEISGVKLESIGTYQILIYSTVASSLALAX

SEQ ID NO: 98 - protein, 531 aa, Influenza A virus
  MISC_FEATURE: subtype H5N1
DQICIGYHANNSTEQVDTIMEKNVTVTHAQDILEKTHNGKLCDLDGVKPLILRDCSVAGWLLGNPMCDEFPNVSEWSYIVEKINPANDLCYPGNFNNYEELKHLLSRINRFEKIKIIPKSSWPDHEASLGVSSACPYQGGPSFYRNVVWLIKKNNTYPTIKESYHNINKEDLLVLWGIHHPNDEEEQIRIYKNPTTYISVGTSTLNQRLVPKIATRSKVNGQSGRVEFFWTILKSNDTINFESNGNFIAPENAYKIVKKGDSTIMKSELEYGNCNTKCQTPIGAINSSMPFHNIHPLTIGECPKYVKSNRLVLATGLRNSPQGEGRRKKRGLFGAIAGFIEGGWQGMVDGWYGYHHSNEQGSGYAADKESTQKAIDGVTNKVNSIIDKMNTQFEAVGREFNNLEKRIENLNKKMEDGFLDVWTYNAELLVLMENERTLDFHDSNVKNLYDKVRLQLRDNAKELGNGCFEFYHRCDNECMESVRNGTYDYPQYSEEARLKREEISGVKLESIGTYQILSIYSTVASSLALAI

SEQ ID NO: 99 - protein, 545 aa, Influenza A virus
  MISC_FEATURE: subtype H5N1
  misc_feature (545)..(545): Xaa can be any naturally occurring amino acid
DQICIGYHANNSTEQVDTIMEKNVTVTHAQDILEKTHNGKLCDLDGVKPLILRDCSVAGWLLGNPMCDEFPNVSEWSYIVEKINPANDLCYPGNFNNYEELKHLLSRINRFEKIKIIPKSSWPDHEASLGVSSACPYQGGPSFYRNVVWLTKKNNTYPTIKKSYHNINKEDLLVLWGIHHPNDEEEQIRIYKNPTTYISVGTSTLNQRLVPKIATRSKVNGQSGRVEFFWTILKSNDTINFESNGNFIAPENAYKIVKKGDSTIMKSELEYGNCNTKCQTPIGAINSSMPFHNIHPLTIGECPKYVKSNRLVLATGLRNSPQGEGRRKKRGLFGAIAGFIEGGWQGMVDGWYGYHHSNEQGSGYAADKESTQKAIDGVTNKVNSIIDKMNTQFEAVGREFNNLEKRIENLNKKMEDGFLDVWTYNAELLVLMENERTLDFHDSNVKNLYDKVRLQLRDNAKELGNGCFEFYHRCDNECMESVRNGTYDYPQYSEEARLKREEISGVKLESIGTYQILSIYSTVASSLALAIMMAGLFLWMCSNGX

SEQ ID NO: 100 - protein, 551 aa, Influenza A virus; identical to SEQ ID NO: 62
  MISC_FEATURE: subtype H5N1

SEQ ID NO: 101 - protein, 551 aa, Influenza A virus; identical to SEQ ID NO: 63
  MISC_FEATURE: subtype H5N1

SEQ ID NO: 102 - protein, 551 aa, Influenza A virus
  MISC_FEATURE: subtype H5N1
  misc_feature (544)..(544): Xaa can be any naturally occurring amino acid
DQICIGYHANNSTEQVDTIMEKNVTVTHAQDILEKTHNGKLCNLDGVKPLILRDCSVAGWLLGNPMCDEFLNVPEWSYIVEKIYPANDLCYPGNFNDYEELKHLLSRINHFEKIQIIPKSSWSDHEASGVSSACPYQGRSSFFRNVVWLTKKDNAYPTIKKSYNNTNQEDLLILWGIHHPNDAAEQTRLYQNPTTYISVGTSTLNQRLVPKIATRSKVNGQSGRMEFFWTILKSNDAINFESNGNFIAPENAYKIVKKGDSTIMKSELEYGNCNTKCQTPIGAINSSMPFHNIHPLTIGECPKYVKSNRLVLATGLRNSPQGERRRKKRGLFGAIAGFIEGGWQGMVDGWYGYHHSNEQGSGYAADKESTQKAIDGVTNKVNSIIDKMNTQFEAVGREFNNLERRIENLNKKMEDGFLDVWTYNAELLVLMENERTLDFHDSNVKNLYDKVRLQLRDNAKELGNGCFEFYHRCDNECMESVRNGTYDYPQYSEEARLKREEISGVKLESIGTYQILSIYSTVASSLALAIMVAGLFLWMCSNGXLQCRICI

SEQ ID NO: 103 - protein, 551 aa, Influenza A virus
  MISC_FEATURE: subtype H5N1
  misc_feature (533)..(533): Xaa can be any naturally occurring amino acid
DQICIGYHANNSTEQVDTIMEKNVTVTHAQDILEKTHNGKLCNLDGVKPLILRDCSVAGWLLGNPMCDEFLDVPEWSYIVEKINPANDLCYPGNFNDYEELKHLLSRINHFEKIQIIPKNSWSDHETSGVSSACPYQGRSSFFRNVVWLTKKNTAYPTIKKSYNNTNQEDLLVLWGIHHPNDAAEQTRLYQNPTTYISVGTSTLNQRLVPKIATRSKVNGQSGRMEFFWTILKSNDAINFESNGNFIAPENAYKIVKKGDSTIMKSELEYGNCNTKCQTPIGAINSSMPFHNIHPLTIGECPKYVKSNRLVLATGLRNSPHGERRRKKRGLFGAIAGFIEGGWQGMVDGWYGYHHSNEQGSGYAADKESTQKAIDGVTNKVNSIIDKMNTQFEAVGREFNNLERRIENLNKKMEDGFLDVWTYNAELLVLMENERTLDFHDSNVKNLYDKVRLQLRDNAKELGNGCFEFYHRCDNECMESVRNGTYDYPQYSEEARLKREEISGVKLESIGTYQILSIYSTVASSLALAIMVXGLFLWMCSNGSLQCRICI

SEQ ID NO: 104 - protein, 550 aa, Influenza A virus
  MISC_FEATURE: subtype H5N1
DQICIGYHANNSTEQVDTIMEKNVTVTHAQDILEKTHNGKLCNLDGVKPLILRDCSVAGWLLGNPMCDEFLNVEWSYIVEKINPTNDLCYPGNFNDYEELKHLLSRINHFEKIQIIPKNYWSDHETSGVSSACPYQGRPSFFRNVVWLTKKNNAYPTIKKSYNNTNQEDLLVLWGIHHPNDAAEQTRLYQNPTTYISVGTSTLNQRLVPKIATRSKVNGQSGRMEFFWTILKSNDAINFESNGNFIAPENAYKIVKKGDSTIMKSELEYGNCNTKCQTPIGAINSSMPFHNIHPLTIGECPKYVKSNRLVLATGLRNSPQGERRRKKRGLFGAIAGFIEGGWQGMVDGWYGYHHSNEQGSGYAADKESTQKAIDGVTNKVNSIIDKMNTQFEAVGREFNNLERRIENLNKKMEDGFLDVWTYNAELLVLMENERTLDFHDSNVKNLYDKVRLQLRDNAKELGNGCFEFYHRCDNECMESVRNGTYDYPQYSEEARLKREEISGVKLESIGTYQILSIYSTVASSLALAIMVAGLFLWMCSNGSLQCRICI

SEQ ID NO: 105 - protein, 551 aa, Influenza A virus
  MISC_FEATURE: subtype H5N1
  misc_feature (544)..(544): Xaa can be any naturally occurring amino acid
DQICIGYHANNSTEQVDTIMEKNVTVTHAQDILEKTHNGKLCNLDGVKPLILRDCSVAGWLLGNPMCDKFLNVPEWSYIVEKINPTNDLCYPGNFNDYEELKHLLSRINHFEKIQIIPKNSWSDHEASGVSSACPYQGRSSFFRNVVWLTKKNNAYPTIKKSYNNTNQEDLLVLWGIHHPNDAAEQTRLYQNPTTYISVGTSTLNQRLVPKIATRSKVNGQSGRMEFFWTILKSNDAINFESNGNFIAPENAYKIVKKGDSTIMKSELEYGDCNTKCQTPIGAINSSMPFHNIHPLTIGECPKYVKSNRLVLATGLRNSPQGERRRKKRGLFGAIAGFIEGGWQGMVDGWYGYHHSNEQGSGYAADKESTQKAIDGVTNKVNSIIDKMNTQFEAVGREFNNLERRIENLNKKMEDGFLDVWTYNAELLVLMENERTLDFHDSNVKNLYDKVRLQLRDNAKELGNGCFEFYHRCDNECMESVRNGTYDYPQYSEEARLKREEISGVKLESIGTYQILSIYSTVASSLALAIMVAGLFLWMCSNGXLQCRICI

SEQ ID NO: 106 - protein, 551 aa, Influenza A virus
  MISC_FEATURE: subtype H5N1
  misc_feature (533)..(533): Xaa can be any naturally occurring amino acid
DQICIGYHANNSTEQVDTIMEKNVTVTHAQDILEKTHNGKLCNLDGVKPLILRDCSVAGWLLGNPMCDEFLNVPEWSYIVEKINPTNDLCYPGNFNDYEELKHLLSRINHFEKIQIIPKNSWSDHEASGVSSACPYQGRSSFFRNVVWLTKKNNAYPTIKKSYNNTNQEDLLVLWGIHHPNDAAEQTRLYQNPTTYISVGTSTLNQRLVPKIATRSKVNGQSGRMEFFWTILKSNDAINFESNGNFIAPENAYKIVKKGDSTIMKSELEYGDCNTKCQTPIGAINSSMPFHNIHPLTIGECPKYVKSNRLVLATGLRNSPQGERRRKKRGLFGAIAGFIEGGWQGMVDGWYGYHHSNEQGSGYAADKESTQKAIDGVTNKVNSIIDKMNTQFEAVGREFNNLERRIENLNKKMEDGFLDVWTYNAELLVLMENERTLDFHDSNVKNLYDKVRLQLRDNAKELGNGCFEFYHRCDNECMESVRNGTYDYPQYSEEARLKREEISGVKLESIGTYQILSIYSTVASSLALAIMVXGLFLWMCSNGSLQCRICI

SEQ ID NO: 107 - protein, 551 aa, Influenza A virus
  MISC_FEATURE: subtype H5N1
  misc_feature (155)..(155): Xaa can be any naturally occurring amino acid
DQICIGYHANNSTEQVDTIMEKNVTVTHAQDILEKTHNGKLCNLDGVKPLILRDCSVAGWLLGNPMCDEFLNVPEWSYIVEKINPANDLCYPGNFNDYEELKHLLSRINHFEKIQIIPKNSWSDHEASGVSSACPYQGRSSFFRNVVWLTKKNNXYPTIKKSYNNTNQEDLLVLWGIHHPNDAAEQTKLYQNPTTYISVGTSTLNQRLVPKIATRSKVNGQSGRMEFFWTILKSNDAINFESNGNFIAPENAYKIVKKGDSTIMKSELEYGNCNTKCQTPIGAINSSMPFHNIHPLTIGECPKYVKSNRLVLATGLRNSPQGERRRKKRGLFGAIAGFIEGGWQGMVDGWYGYHHSNEQGSGYAADKESTQKAIDGVTNKVNSIIDKMNTQFEAVGREFNNLERRIENLNKKMEDGFLDVWTYNAELLVLMENERTLDFHDSNVKNLYDKVRLQLRDNAKELGNGCFEFYHRCDNECMESVRNGTYDYPQYSEEARLKREEISGVKLESIGTYQILSIYSTVASSLALAIMVAGLFLWMCSNGSLQCRICI

SEQ ID NO: 108 - protein, 551 aa, Influenza A virus
  MISC_FEATURE: subtype H5N1
  misc_feature (531)..(531): Xaa can be any naturally occurring amino acid
DQICIGYHANNSTEQVDTIMEKNVTVTHAQDILEKTHNGKLCNLDGVKPLILRDCSVAGWLLGNPMCDEFLNVPEWSYIVEKINPANDLCYPGNFNDYEELKHLLSRINHFEKIQIIPKNSWSDHEASGVSSACPYQGRSSFFRNVVWLTKKNNAYPTIKKSYNNTNQEDLLVLWGIHHPNDEAEQTRLYQNPTTYISVGTSTLNQRLVPKIATRSKVNGQSGRMEFFWTILKSNDAINFESNGNFIAPENAYKIVKKGDSTIMKSELEYGNCNTKCQTPIGAINSSMPFHNIQGMVDGWYGYHHSNEQGSGYAADKESTQKAIDGVTNKVNSIIDKMNTQFEAVGREFNNLEHPLTIGECPKYVKSNRLVLATGLRNSPQGERRRKKRGLFGAIAGFIEGGWRRIENLNKKMEDGFLDVWTYNAELLVLMENERTLDFHDSNVKNLYDKVRLQLRDNAKELGNGCFEFYHRCDNECMESVRNGTYDYPQYSEEARLKREEISGVKLESIGTYQILSIYSTVASSLALAIXVAGLFLWMCSNGSLQCRICI

SEQ ID NO: 109 - protein, 551 aa, Influenza A virus
  MISC_FEATURE: subtype H5N1
  misc_feature (520)..(520): Xaa can be any naturally occurring amino acid
DQICIGYHANNSTEQVDTIMEKNVTVTHAQDILEKTHNGKLCNLDGVKPLILRDCSVAGWLLGNPMCDEFLNVPEWSYIVEKINPANDLCYPGNFNDYEELKHLLSRINHFEKIQIIPKNSWSDHEASGVSSACPYQGRSSFFRNVVWLTKKNNAYPTIKKSYNNTNQEDLLVLWGIHHPNDAAEQTRLYQNPTTYISVGTSTLNQRLVPKIANRSKVNGQSGRMEFFWTILKSNDAINFESNGNFIAPENAYKIVKKGDSTIMKSELEYGNCNTKCQTPIGAINSSMPFHNIHPLTIGECPKYVKSNRLVLATGLRNSPQGERRRKKRGLFGAIAGFIEGGWQGMVDGWYGYHHSNEQGSGYAADKESTQKAIDGVTNKVNSIIDKMNTQFEAVGREFNNLERRIENLNKKMEDGFLDVWTYNAELLVLMENERTLDFHDSNVKNLYDKVRLQLRDNAKELGNGCFEFYHRCDNECMESVRNGTYDYPQYSEEARLKREEISGVKLESIGTYQILSIYXTVASSLALAIMVAGLFLWMCSNGSLQCRICI

SEQ ID NO: 110 - protein, 551 aa, Influenza A virus
  MISC_FEATURE: subtype H5N1
  misc_feature (531)..(531): Xaa can be any naturally occurring amino acid
DQICIGYHANNSTEQVDTIMEKNVTVTHAQDILEKTHNGKLCNLDGVKPLILRDCSVAGWLLGNPMCDEFLNVPEWSYIVEKINPANDLCYPGNFNDYEELKHLLSRINHFEKIQIIPKNSWSDHEASGVSSACPYQGRSSFFRNVVWLTKKDNAYPTIKRSYNNTNQEDLLVLWGIHHPNDAAEQTRLYQNPTTYISVGTSTLNQRLVPKIATRSKVNGQSGRMEFFWTILKSNDAINFESNGNFIAPENAYKIVKKGDSTIMKSELEYGNCNTKCQTPIGAINSSMPFHNIHPLTIGECPKYVKSNRLVLATGLRNSPQGERRRKKRGLFGAIAGFIEGGWQGMVDGWYGYHHSNEQGSGYAADKESTQKAIDGVTNKVNSIIDKMNTQFEAVGREFNNLERRIENLNKKMEDGFLDVWTYNAELLVLMENERTLDFHDSNVKNLYDKVRLQLRDNAKELGNGCFEFYHRCDNECMESVRNGTYDYPQYSEEARLKREEISGVKLESIGTYQILSIYSTVASSLALAIXVAGLFLWMCSNGSLQCRICI

SEQ ID NO: 111 - protein, 552 aa, Influenza A virus; identical to SEQ ID NO: 53
  MISC_FEATURE: subtype H5N1

SEQ ID NO: 112 - protein, 552 aa, Influenza A virus; identical to SEQ ID NO: 74
  MISC_FEATURE: subtype H5N1
  misc_feature (359)..(359): Xaa can be any naturally occurring amino acid

SEQ ID NO: 113 - protein, 552 aa, Influenza A virus; identical to SEQ ID NO: 75
  MISC_FEATURE: subtype H5N1

SEQ ID NO: 114 - protein, 552 aa, Influenza A virus; identical to SEQ ID NO: 76
  MISC_FEATURE: subtype H5N1

SEQ ID NO: 115 - protein, 552 aa, Influenza A virus; identical to SEQ ID NO: 77
  MISC_FEATURE: subtype H5N1

SEQ ID NO: 116 - protein, 552 aa, Influenza A virus
  MISC_FEATURE: subtype H5N1
  misc_feature (540)..(540): Xaa can be any naturally occurring amino acid
DQICIGYHANNSTEQVDTIMEKNVTVTHAQDILEKTHNGKLCDLDGVKPLILRDCSVAGWLLGNPMCDEFPNVSEWSYIVEKTNPANDLCYPGNFNNYEELKHLLSRINRFEKIKIIPKSSWPDHEASLGVSSACPYQGRPSFYRNVVWLIKKNNTYPTIKESYHNTNQEDLLVLWGIHHPNDEEEQTRIYKNPTTYISIGTSTLNQRLIPKIATRSKVNGQSGRVEFFWTILKSNDTINFESNGNFIAPENAYKIVKKGDSTIMKSELEYGNCNTKCQTPIGAINSSMPFHNIHPLTIGECPKYVKSNRLVLATGLRNSPQGEGRRKKRGLFGAIAGFIEGGWQGMVDGWYGYHHSNEQGSGYAADKESTQKAIDGVTNKVNSIIDKMNTQFEAVGREFNNLEKRIENLNKKMEDGFLDVWTYNAELLVLMENERTLDFHDSNVKNLYDKVRLQLRDNAKELGNGCFEFYHRCDNECMESVRNGTYDYPQYSEEARLKREEISGVKLESIGTYQILSIYSTVASSLALAIMMAGLFLWXCSNGSLQCRICI

SEQ ID NO: 117 - protein, 552 aa, Influenza A virus
  MISC_FEATURE: subtype H5N1
  misc_feature (543)..(543): Xaa can be any naturally occurring amino acid
DQICIGYHANNSTEQVDTIMEKNVTVTHAQDILEKTHNGKLCDLDGVKPLILRDCSVAGWLLGNPMCDEFPNVSEWSYIVEKINPANDLCYPGNFNNYEELKHLLSRINRFEKIQIIPKSSWPDHEASLGVSSACPYQGEPSFYRNVVWLIKKNNTYPTIKENYHNTNQEDLLVLWGIHHPNDEEEQKRIYKNPTTYISVGTSTLNQRLVPKIATRPKVNGQSGRVEFFWTILKSNDTINFESNGNFIAPKNAYKIVKKGSSTIMKSELEYGNCSTKCQTPIGAINSSMPFHNIHPLTIGECPKYVKSNRLVLATGLRNSPQGEGRRKKRGLFGAIAGFIEGGWQGMVDGWYGYHHSNEQGTGYAADKESTQKAIDGVTNKVNSIIDKMNTQFEAVGREFNNLEKRIENLNKKMEDGFLDVWTYNAELLVLMENERTLDFHDSNVRNLYDKVRLQLRDNAKELGNGCFEFYHKCDNECMESVRNGTYDYPQYSKEARLKREEISGVKLESIGTYQILSIYSTVASSLALAIMVAGLSLWMCSXGSLQCRICI

SEQ ID NO: 118 - protein, 552 aa, Influenza A virus; identical to SEQ ID NO: 80
  MISC_FEATURE: subtype H5N1

SEQ ID NO: 119 - protein, 552 aa, Influenza A virus
  MISC_FEATURE: subtype H5N1
DQICIGYHANNSTEQVDTIMEKNVTVTHAQDILEKTHNGKLCDLDGVKPLILRGCSVAGWLLGNPMCDEFPNVSEWSYIVEKINPANDLCYPGNFNNYEELKHLLSRINRFEKIQIIPKSSWPDHEASLGVSSACPYQGEPSFYRNVVWLIKKNNTYPTIKESYHNTNQEDLLVLWGIHHPNDEEEQKRIYKNPTTYISVGTSTLNQRLVPKIATRPKVNGQSGRVEFFWTILKSNDTINFESNGNFIAPKNAYKIVKKGSSTIMKSELEYGNCSTKCQTPIGAINSSMPFHNIHPLTIGECPKYVKSNRLVLATGLRNSPQGEGRRKKRGLFGAIAGFIEGGWQGMVDGWYGYHHSNEQGTGYAADKESTQKAIDGVTNKVNSIIDKMNTQFEAVGREFNNLEKRIENLNKKMEDGFLDVWTYNAELLVLMENERTLDFHDSNVRNLYDKVRLQLRDNAKELGNGCFEFYHKCDNECMESVRNGTYDYPQYSKEARLKREEISGVKLESIGTYQILSIYSTVASSLALAIMVAGLSLWMCSNGSLQCRICI

SEQ ID NO: 120 - protein, 552 aa, Influenza A virus
  MISC_FEATURE: subtype H5N1
  misc_feature (545)..(545): Xaa can be any naturally occurring amino acid
DQICIGYHANNSTEQVDTIMEKNVTVTHAQDILEKTHNGKLCDLDGVKPLILRDCSVAGWLLGNPMCDEFPNVSEWSYIVEKINPANDLCYPGNFNNYEELKHLLSRINRFEKIKIIPKSSWPDHEASLGVSSACPYQGGPSFYRNVVWLIKKNNTYPTIKKSYHNTNQEDLLVLWGIHHPNDEEEQTRIYKNPTTYISVGTSTLNQRLVPKIATRSKVNGQSGRVEFFWTILKSNDTINFESNGNFIAPENAYKIVKKGDSTIMKSELEHGNCNTKCQTPIGAINSSMPFHNIHPLTIGECPKYVKSNRLVLATGLRNSPQGEGRRKKRGLFGAIAGFIEGGWQGMVDGWYGYHHSNEQGSGYAADKESTQKAIDGVTNKVNSIIDKMNTQFEAVGREFNNLEKRIENLNKKMEDGFLDVWTYNAELLVLMENERTLDFHDSNVKNLYDKVRLQLRDNAKELGNGCFEFYHRCDNECMESVRNGTYDYPQYSEEARLNREEISGVKLESIGTYQILSIYSTVASSLALAIMMAGLFLWMCSNGXLQCRICI

SEQ ID NO: 121 - protein, 552 aa, Influenza A virus
  MISC_FEATURE: subtype H5N1
  misc_feature (120)..(120): Xaa can be any naturally occurring amino acid
DQICIGYHANNSTEQVDTIMEKNVTVTHAQDILEKTHNGKLCDLDGVKPLILRDCSVAGWLLGNPMCDEFPNVSEWSYIVEKINPANDLCYPGNFNNYEELKHLLSRINRFEKIKIIPKXSWPDHEASLGVSSACPYQGGPSFYRNVVWLIKKNNTYPTIKESYHNTNQEDLLVLWGIHHPNDEEEQTRIYKNPTTYISIGTSTLNQRLVPKIATRSKVNGQSGRVEFFWTILKSNDTINFESNGNFIAPENAYKIVKKGDSTIMKSELEYGNCNTKCQTPIGAINSSMPFHNIHPLTIGECPKYVKSNRLVLATGLRNSPQGEGRRKKRGLFGAIAGFIEGGWQGMVDGWYGYHHSNEQGSGYAADKESTQKAIDGVTNKVNSIIDKMNTQFEAVGREFNNLEKRIENLNKKMEDGFLDVWTYNAELLVLMENERTLDFHDSNVKNLYDKVRLQLRDNAKELGNGCFEFYHRCDNECMESVRNGTYDYPQYSEEARLKREEISGVKLESIGTYQILSIYSTVAGSLALAIMMAGLFLWMCSNGSLQCRICI

SEQ ID NO: 122 - protein, 552 aa, Influenza A virus
  MISC_FEATURE: subtype H5N1
  misc_feature (534)..(534): Xaa can be any naturally occurring amino acid
DQICIGYHANNSTEQVDTIMEKNVTVTHAQDILEKTHNGKLCDLDGVKPLILRDCSVAGWLLGNPMCDEFPNVSEWSYIVEKINPANDLCYPGNFNNYEELKHLLSRINRFEKIKIIPKSSWPDHEASLGVSSACPYQEGPSFYRNVVWLIKKNNTYPTIKKSYHNTNQEDLLVLWGIHHPNDEEEQTRIYKNPTTYISVGTSTLNQRLVPKIATRSKVNGQSGRVEFFWTILKSNDTINFESNGNFIAPENAYKIVKKGDSTIMKSELEYGNCNTKCQTPIGAINSSMPFHNIHPLTIGECPKYVKSNRLVLATGLRNSPQGEGRRKKRGLFGAIAGFIEGGWQGMVDGWYGYHHSNEQGSGYAADKESTQKAIDGVTNKVNSIIDKMNTQFEAVGREFNNLEKRIENLNKKMEDGFLDVWTYNAELLVLMENERTLDFHDSNVKNLYDKVRLQLRDNAKELGNGCFEFYHRCDNECMESVRNGTYDYPQYSEEARLKREEISGVKLESIGTYQILSIYSTVASSLALAIMVXGLFLWMCSNGSLQCRICI

SEQ ID NO: 123 - protein, 552 aa, Influenza A virus
  MISC_FEATURE: subtype H5N1
  misc_feature (141)..(141): Xaa can be any naturally occurring amino acid
  misc_feature (316)..(316): Xaa can be any naturally occurring amino acid
  misc_feature (534)..(534): Xaa can be any naturally occurring amino acid
DQICIGYHANNSTEQVDTIMEKNVTVTHAQDILEKTHNGKLCDLDGVKPLILRDCSVAGWLLGNPMCDEFPNVSEWSYIVEKINPANDLCYPGNFNNYEELKHLLSRINRFEKIKIIPKSSWPDHEASLGVSSACPYQGGXSFYRNVVWLIKKNNTYPTIKESYHNTNQEDLLVLWGIHHPNDEEEQTRIYKNPTTYISIGTSTLNQRLVPKIATRSKVNGQSGRVEFFWTILKSNDTINFESNGNFIAPENAYKIVKKGDSTIMKSELEYGNCNTKCQTPIGAINSSMPFHNIHPLTIGECPKYVKSNRLVLATXLRNSPQGEGRRKKRGLFGAIAGFIEGGWQGMVDGWYGYHHSNEQGSGYAADKESTQKAIDGVTNKVNSIIDKMNTQFEAVGREFNNLEKRIENLNKKMEDGFLDVWTYNAELLVLMENERTLDFHDSNVKNLYDKVRLQLRDNAKELGNGCFEFYHRCDNECMESVRNGTYDYPQYSEEARLKREEISGVKLESIGTYQILSIYSTVAGSLALAIMVXGLFLWMCSNGSLQCRICI

SEQ ID NO: 124 - protein, 552 aa, Influenza A virus
  MISC_FEATURE: subtype H5N1
DQICIGYHANNSTEQVDTIMEKNVTVTHAQDILEKTHNGKLCDLDGVKPLILRDCSVAGWLLGNPMCDEFPNVSEWSYIVEKINPANDLCYPGNFNNYEELKHLLSRINRFEKIQIIPKSSWPDHEASLGVSSACPYQGEPSFYRNVVWLIKKNNTYPTIKENYHNTNQEDLLVLWGIHHPNDEEEQKRIYKNPTTYISVGTSTLTQRLVPKIATRPKVNGQSGRVEFFWTILKSNDTINFESNGNFIAPKNAYKIVKKGSSTIMKSELEYGNCSTKCQTPIGAINSSMPFHNIHPLTIGECPKYVKSNRLVLATGLRNSPQGEGRRKKRGLFGAIAGFIEGGWQGMVDGWYGYHHSNEQGTGYAADKESTQKAIDGVTNKVNSIIDKMNTQFEAVGREFNNLEKRIENLNKKMEDGFLDVWTYNAELLVLMENERTLDFHDSNVRNLYDKVRLQLRDNAKELGNGCFEFYHKCDNECMESVRNGTYDYPQYSKEARLKREEISGVKLESIGTYQILSIYSTVASSLALAIMVAGLSLWMCSNGSLQCRICI

SEQ ID NO: 125 - protein, 552 aa, Influenza A virus
  MISC_FEATURE: subtype H5N1
  misc_feature (550)..(550): Xaa can be any naturally occurring amino acid
DQICIGYHANNSTEQVDTIMEKNVTVTHAQDILEKTHNGKLCDLDGVKPLILRDCSVAGWLLGNPMCDEFPNVSEWSYIVEKINPANDLCYPGNFNNYEELKHLLSRINRFEKIQIIPKSSWPDHEASLGVSSACPYQGEPSFYRNVVWLIKKNNTYPTIKESYHNTNQEDLLVLWGIHHPNDEEEQKRIYKNPTTYISVGTSTLNQRLVPKIATRPKVNGQSGRVEFFWTILKSNDTINFESNGNFIAPKNAYKIVKKGSSTIMKSELEYGNCSTKCQTPIGAINSSMPFHNIHPLTIGECPKYVKSNRLVLATGLRNSPQGEGRRKKRGLFGAIAGFIEGGWQGMVDGWYGYHHSNEQGTGYAADKESTQKAIDGVTNKVNSIIDKMNTQFEAVGREFNNLEKRIENLNKKMEDGFLDVWTYNAELLVLMENERTLDFHDSNVRNLYDKVRLQLRDNAKELGNGCFEFYHKCDNECMESVRNGTYDYPQYSKEARLKREEISGVKLESIGTYQILSIYSTVASSLALAIMVAGLSLWMCSNGSLQCRXCI

SEQ ID NO: 126 - protein, 552 aa, Influenza A virus
  MISC_FEATURE: subtype H5N1
  misc_feature (535)..(535): Xaa can be any naturally occurring amino acid
DQICIGYHANNSTEQVDTIMEKNVTVTHAQDILEKTHNGKLCDLDGVKPLILRDCSVAGWLLGNPMCDEFPNVSEWSYIVEKINPANDLCYPGNFNNYEELKHLLSRINRFEKIQIIPKSSWPDHEASLGVSSACPYQGEPSFYRNVVWLIKKNNTYPTIKENYHNTNQEDLLVLWGIHHPNDEEEQKRIYKNPTTYISVGTSTLNQRLVPKIATRPKVNGQSGRVEFFWTILKSNDTINFESNGNFIAPKNAYKIVKKGSSTIMKSELEYGNCSTKCQTPIGAINSSMPFHNIHPLTIGECPKYVKSNRLVLATGLRNSPQGEGRRKKRGLFGAIAGFIEGGWQGMVDGWYGYHHSNEQGTGYAADKESTQKAIDGVTNKVNSIIDKMNTQFEAVGREFNNLEKRIENLNKKMEDGFLDVWTYNAELLVLMENERTLDFHDSNVRNLYDKVRLQLRDNAKELGNGCFEFYHKCDNECMESVRNGTYDYPQYSKEARLKREEISGVKLESIGTYQILSIYSTVASSLALAIMVAXLFLWMCSNGSLQCRICI

SEQ ID NO: 127 - protein, 552 aa, Influenza A virus; identical to SEQ ID NO: 89
  MISC_FEATURE: subtype H5N1

SEQ ID NO: 128 - protein, 552 aa, Influenza A virus
  MISC_FEATURE: subtype H5N1
  misc_feature (7)..(7): Xaa can be any naturally occurring amino acid
  misc_feature (188)..(188): Xaa can be any naturally occurring amino acid
  misc_feature (206)..(206): Xaa can be any naturally occurring amino acid
  misc_feature (517)..(517): Xaa can be any naturally occurring amino acid
DQICIGXHANNSTEQVDTIMEKNITVTHAQDILEKTHNGKLCDLDGVKPLILRDCSVAGWLLGNPMCDEFLNVSEWSYIVEKINPANDLCYPGNFNNYEELKHLLSRINRFEKIQIISKNSWPDHEASLGVSAACPYQGGLSFYRNVVWLIEKNNTYPLIKKNYHNTNQEDLLVLWGIHHPNDEAEQXRLYKNSTTYISVGTSTLXQRLVPKIATRPKVNGQSGRVEFFWTILKSNDVINFESNGNFIAPENAYKIVKKGDSTIMKSDLEYGNCSTKCQTPIGAINSSMPFHNIHPLTIGECPKYVKSNRLVLATGLRNSPQGERRRKKRGLFGAIAGFIEGGWQGMVDGWYGYHHSNEQGSGYAADKESTQKAIDGVTNKVNSIIDKMNTQFEAVGREFNNLERRIENLNKKMEDGFLDVWTYNAELLVLMENERTLDFHDSNVKNLYDKVRLQLRDNAKELGNGCFEFYHRCDNECMESVRNGTYDYPQYSEEARLKREEISGAKLESIGTYQIXSIYSTVASSLALAIMVAGLFLWMCSNGSLQCRICI

SEQ ID NO: 129 - protein, 552 aa, Influenza A virus
  MISC_FEATURE: subtype H5N1
DQICIGYHANNSTEQVDTIMEKNVTVTHAQDILEKTHNGKLCDLDGVKPLILRDCSVAGWLLGNPMCDEFPNVSEWSYIVEKINPANDLCYPGNFNNYEELKHLLSRINRFEKIKIIPKSSWPDHEASLGVSSACPYQRGPSFYRNVVWLIKKNNTYPTIKKSYHNTNQEDLLVLWGIHHPNDEEEQTRIYKNPTTYISVGTSTLNQRLVPKIATRSKVNGQSGRVEFFWTILKSNDTINFESNGNFIAPENAYKIVKKGDSTIMKSELEYGNCNTKCQTPIGAINSSMPFHNIHPLTIGECPKYVKSNRLVLATGLRNSPQGEGRRKKRGLFGAIAGFIEGGWQGMVDGWYGYHHSNEQGSGYAADKESTQKAIDGVTNKVNSIIDKMNTQFEAVGREFNNLEKRIENLNKKMEDGFLDVWTYNAELLVLMENERTLDFHDSNVKNLYDKVRLQLRDNAKELGNGCFEFYHRCDNECMESVKNGTYDYPQYSEEARLKREEISGVKLESIGTYQILSIYSTVASSLALAIMVAGLFLWMCSNGSLQCRICI

SEQ ID NO: 130 - protein, 552 aa, Influenza A virus
  MISC_FEATURE: subtype H5N1
DQICIGYHANNSTEQVDTIMEKNVTVTHAQDILEKTHNGKLCDLDGVKPLILRDCSVAGWLLGNPMCDEFPNVSEWSYIVEKINPANDLCYPGNFNNYEELKHLLSRINRFEKIQIIPKSSWPDHEASLGVSSACPYQGGPSFYRNVVWLIKKNDTYPTIKESYHNTNQEDLLVLWGIHHPNDEEEQKRIYKNPTTYISVGTSTLNQRLVPKIATRSKVNGQSGRVEFFWTILKSNDTINFESNGNFIAPENAYKIVKKGDSTIMKSELEYGNCSTKCQTPIGAINTSMPFHNIHPLTIGECPKYVKSNRLVLATGLRNSPQGEGRRKKRGLFGAIAGFIEGGWQGMVDGWYGYHHSNEQGSGYAADKESTQKAINGVTNKVNSIIDKMNTQFEAVGREFNNLEKRIENLNKKMEDGFLDVWTYNAELLVLMENERTLDFHDSNVRNLYDKVRLQLRDNAKELGNGCFEFYHRCDNECMESVRNGTYDYPQYSKEARLKREEISGVKLESIGTYQILSIYSTVASSLALAIMVAGLFLWMCSNGSLQCRICI

SEQ ID NO: 131 - protein, 552 aa, Influenza A virus
  MISC_FEATURE: subtype H5N1
  misc_feature (307)..(307): Xaa can be any naturally occurring amino acid
DQICIGYHANNSTEQVDTIMEKNVTVTHAQDILEKTHNGKLCDLDGVKPLILRDCSVAGWLLGNPMCDEFPNVSEWSYIVEKTNPANDLCYPGNFNNYEELKHLLSRINRFEKIKIIPKSSWPDHEASLGVSSACPYQGEPSFYRNVVWLIKKNNTYPTIKESYHNTNQEDLLVLWGIHHPNDEEEQTRIYKNPTTYISVGTSTLNQRLVPKIATRSKVNGQSGRVEFFWTILKSNDTINFESNGNFIAPENAYKIVKKGDSTIMKSELEYGNCSTKCQTPVGAINSSMPFHNIHPLTIGECPKYVXSNRLVLATGLRNSPQGEGRRKKRGLFGAIAGFIEGGWQGMVDGWYGYHHSNEQGSGYAADRESTQKAIDGVTNKVNSIIDKMNTQFEAVGREFNNLEKRIENLNKKMEDGFLDVWTYNAELLVLMENERTLDFHDSNVKNLYDKVRLQLRDNAKELGNGCFEFYHRCDNECIESVRNGTYDYPQYSEEARLKREEISGVKLESIGTYQILSIYSTVASSLALAIMVAGLFLWMCSNGSLQCRICI

SEQ ID NO: 132 - protein, 552 aa, Influenza A virus
  MISC_FEATURE: subtype H5N1
  misc_feature (510)..(510): Xaa can be any naturally occurring amino acid
DQICIGYHANNSTEQVDTIMEKNVTVTHAQDILEKTHNGKLCDLDGVKPLILRDCSVAGWLLGNPMCDEFPNVSEWSYIVEKINPANDLCYPGNFNNYEELKHLLSRINRFEKIQIIPKSSWPDHEASLGVSSACPYQGGPSFYRNVVWLIKKNDTYPTIKESYHNTNQEDLLVLWGIHHPNDEEEQKRIYKNPTTYVSVGTSTLNQRLVPKIATRSKVNGQSGRVEFFWTILKSNDTINFESNGNFIAPENAYKIVKKGDSTIMKSELEYGNCSTKCQTPIGAINTSMPFHNIHPLTIGECPKYVKSNRLVLATGLRNSPQGEGRRKKRGLFGAIAGFIEGGWQGMVDGWYGYHHSNEQGSGYAADKESTQKAIDGVTNKVNSIIDKMNTQFEAVGREFNNLEKRIENLNKKMEDGFLDVWTYNAELLVLMENERTLDFHDSNVRNLYDKVRLQLRDNAKELGNGCFEFYHRCDNECMESVRNGTYDYPQYSEEARLKREEISGVKLEXIGTYQILSIYSTVASSLALAIMVAGLFLWMCSNGSLQCRICI

SEQ ID NO: 133 - protein, 551 aa, Influenza A virus
  MISC_FEATURE: subtype H5N1
  misc_feature (513)..(513): Xaa can be any naturally occurring amino acid
DQICIGYHANNSTEQVDTIMEKNVTVTHAQDILEKTHNGKLCNLDGVKPLILRDCSVAGWLLGNPMCDKFLNVPEWSYIVEKINPANDLCYPGDFNDYEELKHLLSRINHFEKIQIIPKNSWSDHEASGVSSACPYQGRSSFFRNVVWLTKKNNAYPTIKKSYNNTNQEDLLVLWGIHHPNDAAEQTMLYQNPTTYVSVGTSTLNQRLVPKIATRSKVNGQSGRMEFFWTILKSNDAINFESNGNFIAPENAYKIVKKGDSTIMKSELEYGNCNTKCQTPIGAINSSMPFHNIHPLTIGECPKYVKSNRLVLATGLRNSPQGERRRKKRGLFGAIAGFIEGGWQGMVDGWYGYHHSNEQGSGYAADKESTQKAIDGVTNKVNSIIDKMNTQFEAVGREFNNLERRIENLNKKMEDGFLDVWTYNAELLVLMENERTLDFHDSNVKNLYDKVRLQLRDNAKELGNGCFEFYHRCDNECMESVRNGTYDYPQYSEEARLKREEISGVKLESIGTXQILSIYSTVASSLALAIMVAGLFLWMCSNGSLQCRICI

SEQ ID NO: 134 - protein, 551 aa, Influenza A virus
  MISC_FEATURE: subtype H5N1
  misc_feature (7)..(7): Xaa can be any naturally occurring amino acid
  misc_feature (513)..(513): Xaa can be any naturally occurring amino acid
  misc_feature (516)..(516): Xaa can be any naturally occurring amino acid
DQICIGXHANNSTEQVDTIMEKNVTVTHAQDILEKTHNGKLCNLDGVKPLILRDCSVAGWLLGNPMCDEFPNVLEWSYIVEKINPANDLCYPGNFNDYEELKHLLSRINHFEKIQIIPKNSWSDHEASGVSSACPYQRRSSFFRNVVWLTKKNNAYPTIKKSYNNTNQEDLLVLWGIHHPNDAAEQTRLYQNPTTYISVGTSTLNQRLVPKIATRSKVNGQSGRMEFFWTILKSNDAINFESNGNFIAPENAYKIVKKGDSTIMKSELEYGNCNTKCQTPIGAINSSMPFHNIHPLTIGECPKYVKSNRLVLATGLRNSPQGERRRKKRGLFGAIAGFIEGGWQGMVDGWYGYHHSNEQGSGYAADKESTQKAIDGVTNKVNSIIDKMNTQFEAVGREFNNLERRIENLNKKMEDGFLDVWTYNAELLVLMENERTLDFHDSNVKNLYDKVRLQLRDNAKELGNGCFEFYHRCDNECMESVRNGTYDYPQYSEEARLKREEISGVKLESIGTXQIXSIYSTVASSLALAIMVAGLFLWMCSNGSLQCRICI

SEQ ID NO: 135 - protein, 551 aa, Influenza A virus
  MISC_FEATURE: subtype H5N1
  misc_feature (530)..(530): Xaa can be any naturally occurring amino acid
DQICIGYHANNSTEQVDTIMEKNVTVTHAQDILEKTHNGKLCDLDGVKPLILRDCSVAGWLLGNPMCDEFPNVSEWSYIVEKINPANDLCYPGNFNNYEELKHLLSRINRFEKIKIIPKSSWPDHEASLGVSSACPYQGGPSFYRNVVWLIKKNNTYPTIKKSYHNTNQEDLLVLWGIHHPNDEEEQTRIYKNPTTYISVGTSTLNQRLVPKIATRSKVNGQSGRVEFFWTILKSNDTINFESNGNFIAPENAYKIVKKGDSTIMKSELEYGNCNTKCQTPIGAINSSMPFHNIHPLTIGECPKYVKSNRLVLATGLRNSPQGEGRRKKRGLFGAIAGFIEGGWQGMVDGWYGYHHSNEQGSGYAADKESTQKAIDGVTNKVNSIIDKMNTQFEAVGREFNNLEKRIENLNKKMEDGFLDVWTYNAELLVLMENERTLDFHDSNVKNLYDKVRLQLRDNAKELGNGCFEFYHRCDNECMESVRNGTYDYPQYSEEARLKREEISGVKLESIGTYQILIYSTVASSLALAXMVAGLFLWMCSNGSLQCRICI

SEQ ID NO: 136 - protein, 552 aa, Influenza A virus
  MISC_FEATURE: subtype H5N1
DQICIGYHANNSTEQVDTIMEKNVTVTHAQDILEKTHNGKLCDLDGVKPLILRDCSVAGWLLGNPMCDEFPNVSEWSYIVEKINPANDLCYPGNFNNYEELKHLLSRINRFEKIKIIPKSSWPDHEASLGVSSACPYQGGPSFYRNVVWLIKKNNTYPTIKESYHNINKEDLLVLWGIHHPNDEEEQIRIYKNPTTYISVGTSTLNQRLVPKIATRSKVNGQSGRVEFFWTILKSNDTINFESNGNFIAPENAYKIVKKGDSTIMKSELEYGNCNTKCQTPIGAINSSMPFHNIHPLTIGECPKYVKSNRLVLATGLRNSPQGEGRRKKRGLFGAIAGFIEGGWQGMVDGWYGYHHSNEQGSGYAADKESTQKAIDGVTNKVNSIIDKMNTQFEAVGREFNNLEKRIENLNKKMEDGFLDVWTYNAELLVLMENERTLDFHDSNVKNLYDKVRLQLRDNAKELGNGCFEFYHRCDNECMESVRNGTYDYPQYSEEARLKREEISGVKLESIGTYQILSIYSTVASSLALAIMVAGLFLWMCSNGSLQCRICI

SEQ ID NO: 137 - protein, 552 aa, Influenza A virus
  MISC_FEATURE: subtype H5N1
  misc_feature (545)..(545): Xaa can be any naturally occurring amino acid
DQICIGYHANNSTEQVDTIMEKNVTVTHAQDILEKTHNGKLCDLDGVKPLILRDCSVAGWLLGNPMCDEFPNVSEWSYIVEKINPANDLCYPGNFNNYEELKHLLSRINRFEKIKIIPKSSWPDHEASLGVSSACPYQGGPSFYRNVVWLTKKNNTYPTIKKSYHNINKEDLLVLWGIHHPNDEEEQIRIYKNPTTYISVGTSTLNQRLVPKIATRSKVNGQSGRVEFFWTILKSNDTINFESNGNFIAPENAYKIVKKGDSTIMKSELEYGNCNTKCQTPIGAINSSMPFHNIHPLTIGECPKYVKSNRLVLATGLRNSPQGEGRRKKRGLFGAIAGFIEGGWQGMVDGWYGYHHSNEQGSGYAADKESTQKAIDGVTNKVNSIIDKMNTQFEAVGREFNNLEKRIENLNKKMEDGFLDVWTYNAELLVLMENERTLDFHDSNVKNLYDKVRLQLRDNAKELGNGCFEFYHRCDNECMESVRNGTYDYPQYSEEARLKREEISGVKLESIGTYQILSIYSTVASSLALAIMMAGLFLWMCSNGXLQCRICI

SEQ ID NO: 138 - protein, 552 aa, Influenza A virus; identical to SEQ ID NO: 54
  MISC_FEATURE: subtype H5N1

SEQ ID NO: 139 - DNA, 15186 bp, Newcastle disease virus
accaaacagagaatccgtgagttacgataaaaggcgaaggagcaattgaagtcgcacgggtagaaggtgtgaatctcgagtgcgagcccgaagcacaaactcgagaaagccttctgccaacatgtcttccgtatttgatgagtacgaacagctcctcgcggctcagactcgccccaatggagctcatggagggggagaaaaagggagtaccttaaaagtagacgtcccggtattcactcttaacagtgatgacccagaagatagatggagctttgtggtattctgcctccggattgctgttagcgaagatgccaacaaaccactcaggcaaggtgctctcatatctcttttatgctcccactcacaggtaatgaggaaccatgttgcccttgcagggaaacagaatgaagccacattggccgtgcttgagattgatggctttgccaacggcacgccccagttcaacaataggagtggagtgtctgaagagagagcacagagatttgcgatgatagcaggatctctccctcgggcatgcagcaacggaaccccgttcgtcacagccggggccgaagatgatgcaccagaagacatcaccgataccctggagaggatcctctctatccaggctcaagtatgggtcacagtagcaaaagccatgactgcgtatgagactgcagatgagtcggaaacaaggcgaatcaataagtatatgcagcaaggcagggtccaaaagaaatacatcctctaccccgtatgcaggagcacaatccaactcacgatcagacagtctcttgcagtccgcatctttttggttagcgagctcaagagaggccgcaacacggcaggtggtacctctacttattataacctggtaggggacgtagactcatacatcaggaataccgggcttactgcattcttcttgacactcaagtacggaatcaacaccaagacatcagcccttgcacttagtagcctctcaggcgacatccagaagatgaagcagctcatgcgtttgtatcggatgaaaggagataatgcgccgtacatgacattacttggtgatagtgaccagatgagctttgcgcctgccgagtatgcacaactttactcctttgccatgggtatggcatcagtcctagataaaggtactgggaaataccaatttgccagggactttatgagcacatcattctggagacttggagtagagtacgctcaggctcagggaagtagcattaacgaggatatggctgccgagctaaagctaaccccagcagcaaggaggggcctggcagctgctgcccaacgggtctccgaggagaccagcagcatagacatgcctactcaacaagtcggagtcctcactgggcttagcgagggggggtcccaagctctacaaggcggatcgaatagatcgcaagggcaaccagaagccggggatggggagacccaattcctggatctgatgagagcggtagcaaatagcatgagggaggcgccaaactctgcacagggcactccccaatcggggcctcccccaactcctgggccatcccaagataacgacaccgactgggggtattgataaacaaaacccagcctgcttccacaaaaacatcccaatgccctcacccgtagtcgacccctcgatttgcggctctatatgaccacaccctcaaacaaacatccccctctttcctccctccccctgctgtacaactccgcacgccctagataccacaggcacaatgcggctcactaacaatcaaaacagagccgagggaattagaaaaaagtacgggtagaagagggatattcagagatcagggcaagtctcccgagtctctgctctctcctctacctgatagaccaggacaaacatggccacctttacggatgcagagatcgacgagctatttgagacaagtggaactgtcattgacaacataattacagcccagggtaaaccagcagagactgttggaaggagtgcaatcccacaaggcaagaccaaggtgctgagcgcagcatgggagaagcatgggagcatccagccaccggccagtcaagacaaccccgatcgacaggacagatctgacaaacaaccatccacacccgagcaaacgaccccgcatgacagcccgccggccacatccgccgaccagccccccacccaggccacagacgaagccgtcgacacacagctcaggaccggagcaagcaactctctgctgttgatgcttgacaagctcagcaataaatcgtccaatgctaaaaagggcccatggtcgagcccccaagaggggaatcaccaacgtccgactcaacagcaggggagtcaacccagtcgcggaaacagtcaggaaagaccgcagaaccaagtcaaggccgcccctggaaaccagggcacagacgtgaacacagcatatcatggacaatgggaggagtcacaactatcagctggtgcaacccctcatgctctccgatcaaggcagagccaagacaatacccttgtatctgcggatcatgtccagccacctgtagactttgtgcaagcgatgatgtctatgatggaggcgatatcacagagagtaagtaaggttgactatcagctagatcttgtcttgaaacagacatcctccatccctatgatgcggtccgaaatccaacagctgaaaacatctgttgcagtcatggaagccaacttgggaatgatgaagattctggatcccggttgtgccaacatttcatctctgagtgatctacgggcagttgcccgatctcacccggttttagtttcaggccctggagacccctctccctatgtgacacaaggaggcgaaatggcacttaataaactttcgcaaccagtgccacatccatctgaattgattaaacccgccactgcatgcgggcctgatataggagtggaaaaggacactgtccgtgcattgatcatgtcacgcccaatgcacccgagttcttcagccaagctcctaagcaagttagatgcagccgggtcgatcgaggaaatcaggaaaatcaagcgccttgctctaaatggctaattactactgccacacgcagcgggtccctgtccactcggcatcacacggaatctgcaccgagttcccccccgcagacccaaggtccaactctccaagcggcaatcctctctcgcttcctcagccccactgaatggacgcgtaaccgtaattaatctagctacatttaagattaagaaaaaatacgggtagaattggagtgccccaattgtgccaagatggactcatctaggacaattgggctgtactttgattctgcccattcttctagcaacctgttagcatttccgatcgtcctacaaggcacaggagatgggaagaagcaaatcgccccgcaatataggatccagcgccttgacttgtggactgatagtaaggaggactcagtattcatcaccacctatggattcatctttcaagttgggaatgaagaagccactgtcggcatgatcgatgataaacccaagcgcgagttactttccgctgcgatgctctgcctaggaagcgtcccaaataccggagaccttattgagctggcaagggcctgtctcactatgatagtcacatgcaagaagagtgcaactaatactgagagaatggttttctcagtagtgcaggcaccccaagtgctgcaaagctgtagggttgtggcaaacaaatactcatcagtgaatgcagtcaagcacgtgaaagcgccagagaagattcccgggagtggaaccctagaatataaggtgaactttgtctccttgactgtggtaccgaagaaggatgtctacaagatcccagctgcagtattgaaggtttctggctcgagtctgtacaatcttgcgctcaatgtcactattaatgtggaggttgacccgaggagtcctttggttaaatctctgtctaagtctgacagcggatactatgctaacctcttcttgcatattggacttatgaccaccgtagataggaaggggaagaaagtgacatttgacaagctggaaaagaaaataaggagccttgatctatctgtcgggctcagtgatgtgctcgggccttccgtgttggtaaaagcaagaggtgcacggactaagcttttggcacctttcttctctagcagtgggacagcctgctatcccatagcaaatgcttctcctcaggtggccaagatactctggagtcaaaccgcgtgcctgcggagcgttaaaatcattatccaagcaggtacccaacgcgctgtcgcagtgaccgccgaccacgaggttacctctactaagctggagaaggggcacacccttgccaaatacaatccttttaagaaataagctgcgtctctgagattgcgctccgcccactcacccagatcatcatgacacaaaaaactaatctgtcttgattatttacagttagtttacctgcctatcaagttagaaaaaacacgggtagaagattctggatcccggttggcgccctccaggtgcaagatgggctccagaccttctaccaagaacccagcacctatgatgctgactatccgggttgcgctggtactgagttgcatctgtccggcaaactccattgatggcaggcctcttgcagctgcaggaattgtggttacaggagacaaagccgtcaacatatacacctcatcccagacaggatcaatcatagttaagctcctcccgaatctgcccaaggataaggaggcatgtgcgaaagcccccttggatgcatacaacaggacattgaccactttgctcaccccccttggtgactctatccgtaggatacaagagtctgtgactacatctggaggggggagacaggggcgccttataggcgccattattggcggtgtggctcttggggttgcaactgccgcacaaataacagcggccgcagctctgatacaagccaaacaaaatgctgccaacatcctccgacttaaagagagcattgccgcaaccaatgaggctgtgcatgaggtcactgacggattatcgcaactagcagtggcagttgggaagatgcagcagtttgttaatgaccaacttaataaaacagctcaggaattagactgcatcaaaattgcacagcaagttggtgtagagctcaacctgtacctaaccgaattgactacagtattcggaccacaaatcacttcacctgctttaaacaagctgactattcaggcactttacaatctagctggtggaaatatggattacttattgactaagttaggtgtagggaacaatcaactcagctcattaatcggtagcggcttaatcaccggtaaccctattctatacgactcacagactcaactcttgggtatacgggtaactctaccttcagtcgggaacctaaataatatgcgtgccacctacttggaaaccttatccgtaagcacaaccaggggatttgcctcggcacttgtccccaaagtggtgacacaggtcggttctgtgatagaagaacttgacacctcatactgtatagaaactgacttagatttatattgtacaagaatagtaacgttccctatgtcccctggtatttattcctgcttgagcggcaatacgtcggcctgtatgtactcaaagaccgaaggcgcacttactacaccatacatgactatcaaaggttcagtcatcgccaactgcaagatgacaacatgtagatgtgtaaaccccccgggtatcatatcgcaaaactatggagaagccgtgtctctaatagataaacaatcatgcaatgttttatccttaggcgggataactttaaggctcagtggggaattcgatgtaacttatcagaagaatatctcaatacaagattctcaagtaataataacaggcaatcttgatatctcaactgagcttgggaatgtcaacaactcgatcagtaatgctttgaataagttagaggaaagcaacagaaaactagacaaagtcaatgtcaaactgactagcacatctgctctcattacctatatcgttttgactatcatatctcttgtttttggtatacttagcctgattctagcatgctacctaatgtacaagcaaaaggcgcaacaaaagaccttattatggcttgggaataatactctagatcagatgagagccactacaaaaatgtgaacacagatgaggaacgaaggtttccctaatagtaatttgtgtgaaagttctggtagtctgtcagttcagagggttaagaaaaaactaccggttgtagatgaccaaaggacgatatacgggtagaacggtaagagaggccgcccctcaattgcgagccaggcttcacaacctccgttctaccgcttcaccgacaacggtcctcaatcatggaccgcgccgttagccaagttgcgttagagaatgatgaaagagaggcaaaaaatacatggcgcttgatattccggattgcaatcttattcttaacagtagtgaccttggctatatctgtagcctcccttttatatagcatgggggctagcacacctagcgatcttgtaggcataccgactaggaattccagggcagaagaaaagattacatctacacttggttccaatcaagatgtagtagataggatatataagcaagtggcccttgagtctccgttggcattgttaaaaactgagaccacaattatgaacgcaataacatctctctcttatcagattaatggagctgcaaacaacagtgggtggggggcacttatccatgacccagattatataggggggataggcaaagaactcattgtagatgatgctagtgatgtcacatcattctatccctctgcatttcaagaacatctgaattttatcccggcgcctactacaggatcaggttgcactcgaataccctcatttgacatgagtgctacccattactgctacacccataatgtaatattgtctggatgcagagatcactcacattcatatcagtatttagcacttggtgtgctccggacatctgcaacagggagggtattcttttctactctgcgttccatcaacctggacgacacccaaaatcggaagtcttgcagtgtgagtgcaactcccctgggttgtgatatgctgtgctcgaaagtcacggagacagaggaagaagattataactcagctgtccctacgcggatggtacatgggaggttagggttcgacggccagtaccacgaaaaggacctagatgtcacaacattattcggggactgggtggccaactacccaggagtagggggtggatcttttattgacagccgcgtatggttctcagtctacggagggttaaaacccaattcacccagtgacactgtacaggaagggaaatatgtgatatacaagcgatacaatgacacatgcccagatgagcaagactaccagattcgaatggccaggtcttcgtataagcctggacggtttggtgggaaacgcatacagcaggctatcttatctatcaaggtgtcaacatccttaggcgaagacccggtactgactgtaccgcccaacacagtcacactcatgggggccgaaggcagaattctcacagtagggacatctcatttcttgtatcaacgagggtcatcatacttctctcccgcgttattatatcctatgacagtcagcaacaaaacagccactcttcatagtccttatacattcaatgccttcactcggccaggtagtatcccttgccaggcttcagcaagatgccccaacccgtgtgttactggagtctatacagatccacatcccctaatcttctatagaaaccacaccttgcgaggggtattcgggacaatgcttgatggtgtacaagcaagacttaaccctgcgtctgcagtattcgatagcacatcccgcagtcgcattactcgagtgagttcaagcagtaccaaagcagcatacacaacatcaacttgttttaaagtggtcaagactaataagacctattgtctcagcattgctgaaatatctaatactctcttcggagaattcagaatcgtcccgttactagttgagatcctcaaagatgacggggttagagaagccaggtctggctagttgagtcaattataaaggagttggaaagatggcattgtatcacctatcttctgcgacatcaagaatcaaaccgaatgccggcgcgtgctcgaattccatgttgccagttgaccacaatcagccagtgctcatgcgatcagattaagccttgtcaatagtctcttgattaagaaaaaatgtaagtggcaatgagatacaaggcaaaacagctcatggtaaataatacgggtagaacatggcgagctccggtcctgaaagggcagagcatcagattatcctaccagagtcacacctgtcttcaccattggtcaagcacaaactactctattactggaaattaactgggctaccgcttcctgatgaatgtgacttcgaccacctcattctcagccgacaatggaaaaaaatacttgaatcggcctctcctgatactgagagaatgataaaactcggaagggcagtacaccaaactcttaaccacaattccagaataaccggagtgctccaccccaggtgtttagaagaactggctaatattgaggtcccagattcaaccaacaaatttcggaagattgagaagaagatccaaattcacaacacgagatatggagaactgttcacaaggctgtgtacgcatatagagaagaaactgctggggtcatcttggtctaacaatgtcccccggtcagaggagttcagcagcatccgtacggacccggcattctggtttcactcaaaatggtccacagccaagtttgcatggctccatataaaacagatccagaggcatctgatggtggcagctaggacaaggtctgcggccaacaaattggtgatgctaacccataaggtaggccaagtctttgtcactcctgaacttgtcgttgtgacgcatacgaatgagaacaagttcacatgtcttacccaggaacttgtattgatgtatgcagatatgatggagggcagagatatggtcaacataatatcaaccacggcggtgcatctcagaagcttatcagagaaaattgatgacattttgcggttaatagacgctctggcaaaagacttgggtaatcaagtctacgatgttgtatcactaatggagggatttgcatacggagctgtccagctactcgagccgtcaggtacatttgcaggagatttcttcgcattcaacctgcaggagcttaaagacattctaattggcctcctccccaatgatatagcagaatccgtgactcatgcaatcgctactgtattctctggtttagaacagaatcaagcagctgagatgttgtgtctgttgcgtctgtggggtcacccactgcttgagtcccgtattgccgcaaaggcagtcaggagccaaatgtgcgcaccgaaaatggtagactttgatatgatccttcaggtactgtctttcttcaagggaacaatcatcaacgggtacagaaagaagaatgcaggtgtgtggccgcgagtcaaagtggatacaatatatgggaaggtcattgggcaactacatgcagattcagcagagatttcacacgatatcatgttgagagagtataagagtttatctgcacttgaatttgagccatgtatagaatatgaccctgtcaccaacctgagcatgttcctaaaagacaaggcaatcgcacaccccaacgataattggcttgcctcgtttaggcggaaccttctctccgaagaccagaagaaacatgtaaaagaagcaacttcgactaatcgcctcttgatagagtttttagagtcaaatgattttgatccatataaagagatggaatatctgacgacccttgagtaccttagagatgacaatgtggcagtatcatactcgctcaaggagaaggaagtgaaagttaatggacggatcttcgctaagctgacaaagaagttaaggaactgtcaggtgatggcggaagggatcctagccgatcagattgcacctttctttcagggaaatggagtcattcaggatagcatatccttgaccaagagtatgctagcgatgagtcaactgtcttttaacagcaataagaaacgtatcactgactgtaaagaaagagtatcttcaaaccgcaatcatgatccgaaaagcaagaaccgtcggagagttgcaaccttcataacaactgacctgcaaaagtactgtcttaattggagatatcagacaatcaaattgttcgctcatgccatcaatcagttgatgggcctacctcacttcttcgaatggattcacctaagactgatggacactacgatgttcgtaggagaccctttcaatcctccaagtgaccctactgactgtgacctctcaagagtccctaatgatgacatatatattgtcagtgccagagggggtatcgaaggattatgccagaagctatggacaatgatctcaattgctgcaatccaacttgctgcagctagatcgcattgtcgtgttgcctgtatggtacagggtgataatcaagtaatagcagtaacgagagaggtaagatcagacgactctccggagatggtgttgacacagttgcatcaagccagtgataatttcttcaaggaattaattcatgtcaatcatttgattggccataatttgaaggatcgtgaaaccatcaggtcagacacattcttcatatacagcaaacgaatcttcaaagatggagcaatcctcagtcaagtcctcaaaaattcatctaaattagtgctagtgtcaggtgatctcagtgaaaacaccgtaatgtcctgtgccaacattgcctctactgtagcacggctatgcgagaacgggcttcccaaagacttctgttactatttaaactatataatgagttgtgtgcagacatactttgactctgagttctccatcaccaacaattcgcaccccgatcttaatcagtcgtggattgaggacatctcttttgtgcactcatatgttctgactcctgcccaattagggggactgagtaaccttcaatactcaaggctctacactagaaatatcggtgacccggggactactgcttttgcagagatccagcgactagaagcagtgggattactgagtcctaacattatgactaatatcttaactaggccgcctgggaatggagattgggccagtctgtgcaacgacccatactctttcaattttgagactgttgcaagcccaaatattgttcttaagaaacatacgcgaagagtcctatttgaaacttgttcaaatcccttattgtctggagtgcacacagaggataatgaggcagaagagaaggcattggctgaattcttgcttaatcaagaggtgattcatccccgcgttgcgcatgccatcatggaggcaagctctgtaggtaggagaaagcaaattcaagggcttgttgacacaacaaacaccgtaattaagattgcgcttactaggaggccattaggcataaagaggctgatgcggatagtcaattattctagcatgcatgcaatgctgtttagagacgatgttttttcctccagtagatccaaccaccccttagtctcttctaatatgtgttctctgacactggcagactatgcacggaatagaagctggtcacctttgacgggaggcaggaaaatactgggtgtatctaatcctgatacgatagaactcgtagagggtgagattcttagtgtaagcggagggtgtacaagatgtgacagcggagatgaacaatttacttggttccatcttccaagcaatatagaattgaccgatgacaccagcaagaatcctccgatgagggtaccatatctcgggtcgaagacacaggagaggagagctgcctcacttgcaaaaatagctcatatgtcgccacatgtaaaggctgccctaagggcatcatccgtgttgatctgggcttatggggataatgacgtaaattggactgctgctcttacgattgcaaaatctcggtgtaatgtaaacttagagtatcttcggttactgtcccctttacccacggctgggaatcttcaacatagactagatgatggtataactcagatgacattcacccctgcatctctctacaggtgtcaccttacattcacatatccaatgattctcaaaggctgttcactgaagaaggagtcaaagaggggaatgtggtttaccaacagagtcatgctcttgggtttatctctaatcgaatcgatatttccaatgacagcaaccaggacatatgatgagatcacactgcacctacatagtaaatttagttgctgtatcagagaagcacctgttgcggttcctttcgagctacttggggtggtaccggaactgaggacagtgacctcaaataagtttatgtatgatcctagccctggatcggagggagactttgcgagacttgacttagctatcttcaagagttatgagcttaatctggagtcatatcccacgatagagctaatgaacattctttcaatatccagcgggaagttgattggccagtctgtggtttcttatgatgaagatacctccataaagaatgacgccataatagtgtacgacaatacccgaaattggatcagtgaagctcagaattcagatgtggtccgcctatttgaatatgcagcacttgaagtgctcctcaactgttcttaccaactctattacctgagagtaagaggcctagacaatattgtcttatatatgggtgatttatacaagaatatgccaggaattctactttccaacattgcagctacaatatctcatcccgtcattcattcaaggttacatgcagtgggcctggtcaaccatgacggatcacaccaacttgcagatacggattttatcgaaatgtctgcaaaactattagtatcttgcacccgacgtgtgatctccggcttatattcaggaaataagtatgatctgctgttcccatctgtcttagatgataacctgaatgagaagatgcttcagctgatatcccggttatgctgtctgtacacggtactctttgctacaacaagagaaatcccgaaaataagaggcttaactacaaaagagaaatgttcaatacccactgagtatttactgtcggatgctgtgaaaccattacttagccccgatcaagtgagctctatcatgtctcctaacataattacattcccagctaatccgtactacatgtctcggaagagcctcaatttgatcagggaaagggaggacagggatactatcctggtgttgttgttcccccaagagccattattagagttcccttctgtgcaagatattggtgctcgagtgaaagatccattcacccgacaacctgcggcatttttgcaagagttagatttgagtgctccagcaaggtatgacgcattcacacttagtcagattcatcctgaactcacatctccaaatccggaggaagactacttagtacgatacttgttcagagggatagggactgcatcttcctcttggtataaggcatctcatctcctttctgtacccgaggtaagatgtgcaagacacgggaactccttatacttagctgaagggagcggagccatcatgagtcttctcgaactgcatgtaccacatgaaactatctattacaatacgctcttttcaaatgagatgaaccccccgcaacgacatttcgggccgaccccaactcagtttttgaattcggttgtttataggaatctacaggcggaggtaacatgcaaagatggatttgtccaagagttccgtccattatggagagaaaatacagaggaaagtgacctgacctcagataaagcagtggggtatattacatctgcagtgccctacagatctgtatcattgctgcattgtgacattgaaactcctccagggtccaatcaaagcttactagatcaactagctatcaatttatctctgattgccatgcattctgtaagggagggcggggtagtaatcatcaaagtgttgtatgcaatgggatactactttcatctactcatgaacttgtttgctccgtgttccacaaaaggatatattctctctaatggttatgcatgtcgaggagatatggagtgttacctggtatttgtcatgggttacctgggcgggcctacatttgtacatgaggtggtgaggatggcaaaaactctggtgcagcggcacggtacgctcttgtctaaatcagatgagatcacactgaccaggttattcacctcacagcggcagcgtgtgacagacatcctatccagtcctttaccaagattaataaagtacttgaggaagaatattgacactgcgctgattgaagccgggggacagcccgtccgtccattctgtgcggagagtctggtgagcacgctagcgaacataactcagataacccagattatcgctagtcacattgacacagttatccggtctgtgatatatatggaagctgagggtgatctcgctgacacagtatttctatttaccccttacaatctctctactgacgggaaaaagaggacatcacttaaacagtgcacgagacagatcctagaggttacaatactaggtcttagagtcgaaaatctcaataaaataggcgatataatcagtctagagcttaaaggcatgatctccatggaggaccttatcccactaaggacatacttgaagcatagtacctgccctaaatatttgaaggctgtcctaggtattaccaaactcaaagaaatgtttacagacacttctgtactgtacttgactcgtgctcaacaaaaattctacatgaaaactataggcaatgcagtcaacggatattacagtaactgtgactcttaacgaaaatcacatattaataggctccttttttggccaattgtattcttgttgatttaatcatattatgttagaaaaaagttgaaccctgactccttaggactcgaattcgaactcaaataaatgtcttaaaaaaaggttgcgcacaattattcttgagtgtagtctcgtcattcaccaaatctttgtttggt

SEQ ID NO: 140 - protein, 546 aa, Avian influenza virus
DQICIGYHANNSTEQVDTIMEKNVTVTHAQDILEKTHNGKLCDLDGVKPLILRDCSVAGWLLGNPMCDEFLNVSEWSYIVEKINPANDLCYPGNFNNYEELKHLLSRINRFEKIQIIPKSSWPDHEASSGVSSACPYQGGPSFYRNVVWLIKKDNAYPTIKKSYHNTNQEDLLVLWGIHHPNDEAEQTRLYQNPTTYISVGTSTLNQRLVPKIATRSKVNGQSGRVEFFWTILKSNDAINFESNGNFIAPENAYKIVKKGDSTIMKSELEYGNCNTKCQTPIGAINSSMPFHNIHPLTIGECPKYVKSNRLVLATGLRNSPQGERRRKKRGLFGAIAGFIEGGWQGMVDGWYGYHHSNEQGSGYAADKESTQKAIDGVTNKVNSIIDKMNTQFEAVGREFNNLERRIENLNKKMEDGFLDVWTYNAELLVLMENERTLDFHDSNVKNLYDKVRLQLRDNAKELGNGCFEFYHRCDNECMESVRNGTYDYPQYSEEARLKREEISGVKLESIGTYQILSIYSTVASSLALAIMVAGLFLWMCSNGSL
